United States Patent Application Publication US 2008/0108056 A1 - sequence listing, part 2

SEQ ID NO: 4577 - DNA, 400 bp, Aspergillus oryzae
cgagtcaattccgcgacgcctcatgcaagggaacggatacagccgatatcacagatagtgatttggaaggcgatctaacatcggaaaagacggtgctcatttcacaacgagagcatgattatctacccgatgatcctctcgtcggtgttgtgtacgaggtcactcttaccgactacgctcgcataatagcgacagaaggaggcgggaatggatacaaggacatcgttatagactgctatccattcgctgaatcttacgacccaaccgagcctattcctgactgtccagaatcgaaaccgttcaaggcacatacccttctcgctcctgtcacgagcctagacgagatatcccggcgcgcttatgcacagcgaacacattcattcgtcccgcgatctgggcc

SEQ ID NO: 4578 - DNA, 397 bp, Aspergillus oryzae
cgtgtcgggcttgagaaggcagaagaaggacaagcctcctcattagagacgggtagcgtgcagagcggtgatgccagtatccggtccaaagccgcttctccggagcgagagggtatccatgcggcgaacacgttgggcgagggcactgtccacctgggatctcgatcggtacttgcttacatattgaacaacaagtccgggtcagatcagctgcaagccctgctggaaggtggcatattgccgaaactggggcttgataatgaatctgcgacgtatccatttgtcgacctgtggtcgtctgatatgtccacatttgatgtcagcgctgtttgcagcgcactcccaagttgatcagcagtgcaaggagtttttttactactaaccggggacatagcag

SEQ ID NO: 4579 - DNA, 414 bp, Aspergillus oryzae
cgagggtgttgggtcgaagtcatccaagctttgatggtagccgcggtagccgatttaccgagagtatatgatcctgttcgttgttgtctttcctttagcctttgcaagcgccccttcgttgtccgatgtctggatatatatcatacgagcgttgctctgtacatacgctgagagcttgcactttctttctttcccttcaggacgtgtcaccatcgcaacgggaatggtccttgggcttctaggctggcatgttcctgatcctgttgtactcttactctctatttcttatatggataccccgaattgagttcactgttccttgtcaaacccctgcgcatttctgtcaaaactatctttctttctcgtatgttaataatttatgtgggagttatattttgggggaaatcttgtgcg

SEQ ID NO: 4580 - DNA, 245 bp, Aspergillus oryzae
  modified_base (60)..(60): n is a, c, g, or t
  modified_base (67)..(67): n is a, c, g, or t
  modified_base (109)..(109): n is a, c, g, or t
  modified_base (176)..(176): n is a, c, g, or t
  modified_base (185)..(185): n is a, c, g, or t
  modified_base (194)..(194): n is a, c, g, or t
  modified_base (210)..(210): n is a, c, g, or t
  modified_base (221)..(221): n is a, c, g, or t
tcaaacaaggcaagaaatatgatgaccccgcttccgcaagtcaaattcaagacttcatcngcttccnccaactcgacttgtccgaggttcttcttcccctagagaagtntaagacttttaatgagtttttctatcgcgaactgaagccagtcgctcgaccttgctcggctccggangatccacgnattgttgtntccccagctgactgcngatcagttgtnttcgaccgtcttgaccaagcaacc

SEQ ID NO: 4581 - DNA, 486 bp, Aspergillus oryzae
  modified_base (391)..(391): n is a, c, g, or t
tgttatttgcacaccgaaaaaaggtttagaacctgaactcgtctctttggaatatccttccgagccaaatcactaccacctcccgttgatattccccctacgaccaatctccgatcgcactccgttggttgacggcgcgttcttcccttacccccgcatcatggcttcgggtgaccacacaagctcgagcgtggagctctacgaatccggcttgaccgttcgttcagactcggagaattattcgggccaacaatgagttatccgagtcgacgtcgagttcccctctgatcctctacaaaccccctacaatctgggagtatcttgcgaggcgccgccatcaacctggttcttcccttcgtgaatggactcatgctgggctttggtgaactanttgcacatgaagcagcctttccgcctaggaatggtctggcacgaagattttccctacctatcggaaatcagtcggtcctgggtgtggaggttcga

SEQ ID NO: 4582 - DNA, 522 bp, Aspergillus oryzae
cggcacgaggaacattgtcgcaacagaataccgaaatgggtgacgcaccagcacttcccgactacgtccttgacgccgatgcagtccttaaagacacagaggccgcctggcgacatggccgggtgcccaactattcaaagactagacagttttatgaccagactaaaacaatgaaacacgaggccggaagccttccagacctggtcgaaaaactcgtcaaaaattgggaaatcgaagcctcatacaagacctccctcgccgactggaggaccatcgaccagaagacatatactttttcattaaacggaggcccaccgcagacaggtgagcatatgctcaatgttggcacgtacaacgctctcctgactgcgagctcgtactatgatccggcacacaatgatttcgaaacgagtcataaggcgttcaagcgcatgatgcccacatttgcctgggaggtgacagaagtatatagcggaacgccgactgtggtcttcaagtggagacattggggtgatatggcga

SEQ ID NO: 4583 - DNA, 384 bp, Aspergillus oryzae
  modified_base (285)..(285): n is a, c, g, or t
cggcacgaggctcaaatatacttgagtcgggcaaccaacatgccaaaccaggtgatcacggaactggttcaacagttcctggcagacaccgcttcttataatgcaacttcacccgggggccatattctgatttggccattttttatagtcggggcggagtgctcgtccgagcaagacagggagtttgtcaccatgcagttacagaatctctggggattgtacgggctttgggaagcccgctctatgcgatcaagctgctgggagatatatggcaggaacctccanggacgaattggacgcagacattaagtggataaggtaaaaaggttcattatgttgattagggcttgctcctgaaatattgttgcgcaaatagttgcctaa

SEQ ID NO: 4584 - DNA, 535 bp, Aspergillus oryzae
ttcggcacgagggccttccatgcgacgggccagataagggcaggctccggccatgtacaaacaacaccgctcgaggacgaagaagagcctcgtccgccgtatctacgtgctatgcttgccggaggtaccggtggtacatgcggcgacatgctcatgcattcactcgatacggttaagacgagacagcaaggcgacccccacttccctccgaaatatacttcgatgacctcatcgtatgcgacgatctatcgacagggaaggtttactgcgaggtctgtacggtggagctgttcctgccttttgcggctcctttccaggcactctgatcttctttggtgtttatgagttcaccaaacgacggatgatcgattctggcatcaatgctaatgtagcatacctatccggaggtttctttgcgggatttggccgcttccgttgttctaatgtcccttcagaagtgtttgaaagacacgactgcaactccagggaacgctacaacaaccctcatttcaatttcggggatacaactaaccgg

SEQ ID NO: 4585 - DNA, 421 bp, Aspergillus oryzae
aggcatgtcgctcctggcgatatgcggcgtcggcaccatacatgttcaggaaagctttacagcaagtcccggtgtcattgcctccaacgataaccaccctgactcaagatcaatggaccacgtacttggcgcagatcacccgcttgaatctactacattgccgacagaatattcagaagtcagtgacccaacgggaacttcccctggaatgctccccaaccactgtggtgggcagctcaagcgatggacggaaactggtgacctgaaaggagggcgggtgaccgtatacgagcgtgcaaacctgacgagtccatgggagtactcacgcggtataacactttgctcgcagtggaactctgtcgcccgtgccatgctagaaagggggaccgcaggctgcatgttccatcaatcagcgatacgc

SEQ ID NO: 4586 - DNA, 509 bp, Aspergillus oryzae
tctagtgcagcatgtgtcttccattaacggagtggatagtgtggacgtcgccgagacggagagtatcctctctatccccatccgacgcgagatcagctacgatgtcttaccgccgcctcccgcgcaagagctgttggagacgaaggcggcgactccggcttacagagtgtcaaccgcgaagcgactcggtaggcataaaatatcatagttggatacatcaagacactgactccctgtgaagtccaggtgattataacgctgttggcctgttggtgcgcctccggaatcgtcttcggttttgcggcgctgaagccggtgatgatcagtgaaggcgtgtaccaaaacctgtgcagcgagacggtgttgccaaaggagggcaacgtatgcagagcgcaagatcttcgggtacgttctcccattccagcttatgattcatccgtctcacgcgtttccagcctaaatctattcttcatggtcagctctatcacggcaaatgtgtccgctcttcc

SEQ ID NO: 4587 - DNA, 253 bp, Aspergillus oryzae
ggtattagagttatagagtcacttggagagatgaggggttttgggggaaatcagagagactttggcgcaggtgataatgggatgaatggatttagtggcgagagacaggagggggttgatgagatggacgtggatgagatggacgttggatgagatggacgtggatgagatggacatggatgagatggacatggatgagatggacgtggatgagatggacgtggatgagagtaacgctgggcgagatcgagga

SEQ ID NO: 4588 - DNA, 308 bp, Aspergillus oryzae
ttgcgaaaggagcatggtctggataccgagcaggaatgggatatctggcgcgatggctgtgaggagggagagtctcctcaagaggtcacggatcgcattgacgatcttattaaagagatcgtgagcttcacaaagacaacatgcacggcgagaagcattgtgacgtgctcttggtggcacatggccacttgcttcgggctttcaccaagcgctggcttggataccccatggaatttccctttctatgatgcttgaacctggtgccgtttggtgttttgagctaccacaccatagcattgacgagcctg

SEQ ID NO: 4589 - DNA, 211 bp, Aspergillus oryzae
  modified_base (32)..(32): n is a, c, g, or t
  modified_base (54)..(54): n is a, c, g, or t
  modified_base (62)..(62): n is a, c, g, or t
  modified_base (80)..(80): n is a, c, g, or t
  modified_base (128)..(128): n is a, c, g, or t
gtggatcccccgggctgcaggaattcggcacnaggccacggtctgctgctatanacattacnaagcaaataggtgaaggncccgacttatcatcgtcagcatctaccgctttagactcgacccataancgccttcaacaaatccgaatagaagagccccagccacgctctaactctgtctcgcggtctcgccgggtaaggcgccgccattc

SEQ ID NO: 4590 - DNA, 440 bp, Aspergillus oryzae
  modified_base (67)..(67): n is a, c, g, or t
caatgcagtgaatagtgaaatactgattcgcccttttcgaaccttgaacacctatggtcaatacttnaccctgacattgagtttacaaccttaccctggaacctgagcagcccacgcaacccctccatgaatattaattgttctctacagacttaacttactttattgatatctttgctgttgtcgtgcagaaaacttcttcctgcaattccacgacgagtttgggtcatgatccgaaatattgagcccaaacactccctaagagaccaagatgatgggacggacgacgacgatttgttgaaggccttgggagaacgaagacgactctgcatatcgagcccaacgtatcgaacaactcaacgccgagctagcatccgcccaaaacaaccggtcagtgggcccctggccagaccacaatcacccaaggatagcatatatcc

SEQ ID NO: 4591 - DNA, 653 bp, Aspergillus oryzae
  modified_base (13)..(13): n is a, c, g, or t
  modified_base (328)..(328): n is a, c, g, or t
  modified_base (390)..(390): n is a, c, g, or t
  modified_base (586)..(586): n is a, c, g, or t
  modified_base (595)..(595): n is a, c, g, or t
  modified_base (609)..(609): n is a, c, g, or t
  modified_base (616)..(616): n is a, c, g, or t
cggcacgagggancggagagcaacggaaatccacaattaggaaagcggaacaggttctagatgaagctactgaactgttggaccagatgcgcatggagaagcagaacatcccctcggcggcgcggtcaaaagtcaacgcacgattccgcaactatgccacggatcttgatgagtcgaaacgcaaactgaaatctctttccgacgactcgaaaagcgctctttggcgatcgctacaccgacgacccgcaggatgtacacctggagcataggcagcagcttctgtccgggcacggaccgcctggagcgcagctctgccagactccaaganagccagcggattgctttagagacggaaagatatcggccgcaacacgctagcagatctgatcncgcagcggggaaaccattatgaataccccggagcaatctgcagcaaagcgaatgatatgttggataccagtatcaaaacgttaaggggcatggcccgtaggatggctaccaattcggataatcactattgcgatcataaccgttttggttcttctgattattgccgttatctacagcaagtttcattaaacgttanggctagcangcgttgtacggganttttgcnttggtcttttcatattacgaactgggtgtctgctgtt

SEQ ID NO: 4592 - DNA, 548 bp, Aspergillus oryzae
gtcttgtcctacctttcgctgctgtcaagcttctgggatacagtggagctgtctgcaccacactcatgattttcatggcagtcacatcggctttttcggctcagctaattgctgtttcttccatcctaacttacgatatctatcaggcctatatcaacccctctgcaaagggcaagagattagtgtgggtgtctcacatgtcctgtattttctgggctactgccatggccggcttcgcaacaggtctctactacgcgggtatcggtatgggctatctttacttgctcatgggtgttatcatctcctcggcggtgttcccaggggcgatgaccctcgtctggaagggacagaactgggtcgccgcagctgcatcacctatcctgggactcgccgtgtccctcatcgcatggcttgtaaccgctaaaaaggaatctggtgtattaaccgtcactaccaccggcgcaaactaccctatgctcgctggtaacgtcgccgcctcctcaaccccataaattctccccagtccttacttaattcttcggcctcaa

SEQ ID NO: 4593 - DNA, 315 bp, Aspergillus oryzae
  modified_base (2)..(2): n is a, c, g, or t
  modified_base (33)..(33): n is a, c, g, or t
  modified_base (48)..(48): n is a, c, g, or t
  modified_base (93)..(93): n is a, c, g, or t
  modified_base (189)..(189): n is a, c, g, or t
  modified_base (230)..(230): n is a, c, g, or t
  modified_base (248)..(248): n is a, c, g, or t
angagggtcaggcactgcatgatgtttgcaacntgtcctgtttctaanttgaatctctgatccatcttaaacattcgattccctatactcacntagattcaatggatcgtttttggtctgcgccccctgtgacaaggactctaactgcccttactttcgttcagtccgccttggtttatggtggcctantaagtggtagatatgttatatttcgaccgggactagttttnaagctgcttcctgaggcntggaggttattgtcgtcattcctttctgacagggcccgcgcctcgacttcatacttgatctctactt

SEQ ID NO: 4594 - DNA, 589 bp, Aspergillus oryzae
  modified_base (556)..(556): n is a, c, g, or t
gaggggtcaacgggttcaaagacctgcaaggttccgacggaccgagacggttcactatcgagaagtccggcgatccgggggcgctgcccaaatcccacacatgcttcaaccggctcgatcttcctccgtataagactaatgatgtgttggagcataaactctcgattgcagtggaggagacattaggtttcggacaggagtagaggcatcttttgttctattccgagacaagatattttgcatacgaatatattaattccgccgccgcgtgcaacgcggacggcatgcaaaccaacgcgattgagagggcgcatgcgcatgttcatgatctccactggcttgtgtccctttggcatcccatattcccccttcgttcgtggtcttcgttttgttgcatgcggcttggagcagactatatgaattcttttttattcttctttcgttactttcagagtggtggctttgtatatattctgtattattgtcctatggataacgagctgacttgaatctggagtttttaacattaaggaaggtctaaaatttcgtatccaantttagggtttgtgttgtcctgtggcgcatgtga

SEQ ID NO: 4595 - DNA, 675 bp, Aspergillus oryzae
  modified_base (489)..(489): n is a, c, g, or t
  modified_base (568)..(568): n is a, c, g, or t
aggagaaaaagaaacgaagaaagcccaagaagaaaatttcggcgttaaagcagtcatcgccgccacgggtcccgttggacgatcttttccccacgggccagttccccgtgggcgagacccacgagtatggatccgtcgtcgagggcacggcgcgcacgacgtccgaggaagtccgatatctgtctcggaattatcttcaggatgacagtgtcctcaccgattatcgcaaagcagcagagatacatcgtcaggtccgacactggacccaggagaacgttcgggcctggccagactctcacggagattgccgtgggcattgaggatggcgtgagagcgctactagacaatgctggcctcgagaccgggcagtgtctccagtcgggaatgggatttcccacggggactcgccttgaacgattgcgttgcgcattacacgcctaatccaggccaaaaaggacatcgtcttgcaagcaagcgatgttgatgaangtggattttggtgtcatatcaatggctggattgttgaaagtgcgtttacaatgttcgtttgaccaacttacgacaattnattgccgccgttaaggatgctacgaacaccggtatcaagaatgctggaattgatgttcgttttcaaccaatgttagttgctgccatccaaaaggcgatggaaagctt

SEQ ID NO: 4596 - DNA, 452 bp, Aspergillus oryzae
acgaggaacgttggtctttgcgagcgtttcgaggccttcgtctgcaagaaggagatcgtcaacgcctacaccgagttgaacgaccccttcgaccagcgtctccgtttcgaggagcaggcccgccagaaggaccagggtgacgacgaggctcagctcatcgacgagaacttctgtactagcttggaatacggtctgccccccaccggtggttggggtatgggtatcgaccgtctggtcatgttcctcaccgacaactacagtatcaaggaggtccttgccttccccttcatgaaggaagacaagtcggcggccgagaccaagagtgccgccgaggtggttggtattgagccccagccggaggaaggaattccccacaaaataaatttatgagctacatggggatgatggcttgttgacgactttttgttctgcatgtttaattcgatgtcaac

SEQ ID NO: 4597 - DNA, 515 bp, Aspergillus oryzae
tcccttctgattcaccgtacattctctgagcgagttactctcatataatagtctcccagatgccctccttgccagcctccccgtaccactggctctgaaactaccacttaatctattggagctcaccgcttccatatcgcactttcgaacgagcaacattcagggccgtcgaggagcagctacggctttgtaccgcaaagtggccttccatctggagctagttagagatgttctcagaatatgcctctcgcttccttgcccagtcacaatcacgactacttcctcactctgacgaaacacgcaagaaagggcatggacggctgatgcagcaaccgggaagctcccgctttccatcctcacgttcctttttgcaaagagcaacccttgacccatatcaaccaacggcatctcaaatttctaatcttcctcttgggtcgcgaaacttggcccaagcatgcgcctcttttctacagcgctactgataatttttgccgaagaaggatgatgaaaccaga

SEQ ID NO: 4598 - DNA, 220 bp, Aspergillus oryzae
  modified_base (4)..(4): n is a, c, g, or t
  modified_base (8)..(8): n is a, c, g, or t
  modified_base (50)..(50): n is a, c, g, or t
gtgnacangccccccatttttccctgctaccaaggtcctatcacctaatnatcacagtccgcggagttacttttgccaatacaggccaaacggcgcttctgttaacaacaggggtggttatatccatctgctataccttcgcccaaacaggttcggccagcgcaagaaaggcaagaggcagtgcagcgtgagggtcacttataagcagggatccttttaa

SEQ ID NO: 4599 - DNA, 528 bp, Aspergillus oryzae
  modified_base (518)..(518): n is a, c, g, or t
catgctcactacgatctatgattggttgaagcccgggggtgtcttcgtctttaatcttgcaactgtcgatgaagaagaaatccatggcgaattcctaggatatgggatgttctggagcagctatagtgtggatcagaaccgagcaatgttaacagaaatcggatttgatatcttacagatggaagtattgcacgcaaatgatggaacgttggaggagggggatccggactatgattccgagtttatgtgggtaatggcacgaaagaaagaatctcccgacgatccaagcagtgtacaagcagtgtgatggcttctctgtatctgttctgttctattcgatttagttgagtttgttgtcactggtagttatcagaactaccaaaagtcaccacgcaccactacacattcaagaatgtggaattgatggatatgtatttataatggatttgaatccatggggggaaaggcccagggaattctctggtggttacactaaaaactgaatatattcctatccnaaagtgctct

SEQ ID NO: 4600 - DNA, 512 bp, Aspergillus oryzae
  modified_base (434)..(434): n is a, c, g, or t
  modified_base (443)..(443): n is a, c, g, or t
  modified_base (468)..(468): n is a, c, g, or t
cgaggagcgatcagccaccgccagaaccacaccattattgtcgtttcctttggtgtttgggatgtgtggaacatgttggataaggactacgacactgcaacgcaatcagtagaccgcagcattggtgtcatcatcgatcagctcaatgtgctgtctcagagtttgggcacgaatgagctcaaagtcatcctgacattgacaccagatgtcaccttccttccagcgttcaggcccaccagaagccatatcggtcggcacaaagaggcggtccaaattacggaatattgggaaccgttcgacttcgtgaggctgcggaaaaatgggacctgggcacaatctatctgttcgatacgaacgctttctagccgacctgatccgtgaatggcaactatatgctgcccggcattgaaaaacccaatgggctgggaaagaancaggaactngggtggggaaaatgttcaacaaccntgcgtcgaaaatgaacagccactagtggatgacttcagaaattg

SEQ ID NO: 4601 - DNA, 607 bp, Aspergillus oryzae
  modified_base (559)..(559): n is a, c, g, or t
ccattctccaatgccatggcgaggattgttgaagctggaagcggccccgcggacattaatgacgaatctctctcgcctcgagatgctacagatgaagagattgagtctctgaggcatgtcgttgacaaactacccagaaaagtctgggtctccttgatcgtaagtggagcagagcgcttcacatactacacaatcacaactccgtggcagaactacatacagaatgctccgggtgatggtgccgtgccaggttctcttgggcttgggcagtctcgggcgaccatgatcttcaatgccttctacttattctattatttggtgcctatccccgtcgcccttgtatcggacgcatggctagggcgatacgcggttctctgtatcagcctgagcttgtatttctgtggcacgctcgtacagtttataacgtctctaccttcacttttccactatgaatcaggcctagcaggccttgtcctctctatgatactaataggtatcggtgttggaggaacgaaaagcagcaatcacgcccttcatcggagatcaatacccggtcaanctgcacaagtgaagacctagcgaccggagaacgcgtgatcatagatcg

SEQ ID NO: 4602 - DNA, 534 bp, Aspergillus oryzae
  modified_base (490)..(490): n is a, c, g, or t
aaggcgcaaacgaacgcacacgagagttcccagtggcctgccaatccgtttgtagttgctggtgtagatgacgatggcgacggtgggggctccccttccaatgcctttccctcaacagattttccgtcagcgaacaaggacgagcctttctcgtcacctacattccccgattcaggattcagtccgcctgactctttctcaaccaattcatcagaggacgacgtcgacggcagaagtgagggtttgagacgcaaagaacgtatccctctcgaggtagacgatgatgatgatgacgacatgggcgaaatggtgggtccatctggcgggaccgacatgatggactcggacgaagaagacgaagctattatgaacgaatccttaggctacccggatcttgggacctggacgatataagagcttccaacgatctcgctttggggtctcccttttggtgatgacgatcagaatgacagcagtgatggtgaagacnatggactggtggaaatcctaatttccaggggaagaaatctttga

SEQ ID NO: 4603 - DNA, 558 bp, Aspergillus oryzae
  modified_base (487)..(487): n is a, c, g, or t
  modified_base (515)..(515): n is a, c, g, or t
tcatcagcttcctaccgaacactcctctaacagtcaccacctcttcactatctatcaacaccgtcacaatgggctccgctcaggttgaattcaagaacgcctccaccaacactctcctcgagttggtcaaggcccgccgtacctactatggtctcaaggccgagagccccatctccgacgatgccatccagtccattgtcgagacctccgtcctccacgtccccagctctttcaacacccagacctcccgtgtcgttctcctgctgaaggaggagcaccagaaggtctgggacatcgccatcaaggccatggagggcctcgttgccgccggtgccgtccccaaggaggcgttcgagaaacacaccaagcctaagctcgaggctttccgcgctgcctacggaactgtatgtccaacccaattcccgccacctgaggggatacaaaacaaatactaatataattctccaggtccttcttcttcgtcgantacgagttctctcgctccctccaaggangaagttcgccatctacccgaaaagtttcgacccttcgcctcga

SEQ ID NO: 4604 - DNA, 384 bp, Aspergillus oryzae
  modified_base (354)..(354): n is a, c, g, or t
gcacgaggaaagaagttcccttagtatcttctctttggcgacatctgttctaacggtccaactctctcgccctgtggcctgacttgtatggtctgctccatccattgcatgactcctactatgctgtctacttccacgcacgtgtaaaggtcaggcgcgtggtctacattgtcgtccgttacttgattctattcttctttctttctcactccttcactcgtctgaatttatcggtattcattttgatcagtcgatcttttccgcccaagatgccttctttcaaaccaactctccatccattgcaaacccctcggactatgggtctttccatcagagcttcaagaggactcaggnatcttccagcctttcagccaggcaatgggt

SEQ ID NO: 4605 - DNA, 503 bp, Aspergillus oryzae
  modified_base (376)..(376): n is a, c, g, or t
  modified_base (432)..(432): n is a, c, g, or t
  modified_base (444)..(444): n is a, c, g, or t
ctcgggttgtctcaatggtggaaaagcagagcccaaacaccacagacgccagcaagaacctcccagccacactatgggcccatctccagaaaggactagaacagaccgtctcaatggacagtatagaccggttccctcacatagtcaagaccatgcgcgtgcccatcttggattgtttgccctttcaaaatgtcgttcttcaagaaatgcagtcgttcattgaccagctcggtccctggctccacgaagcttggtgtaccaaccgggaggcctatttggttcatggcgatgctagccccgtgttgggagacgggtctaagaagatgtatcacttcgttcggaagactcttggggtgccgatgttgtgtacaaagangatattgacgcccactgcggaagccatggctgctgggcaggtggaggaagcacctnacggtgggcggntacacaagtcttatctatcgggcaattcaacgaagtgaatttttgccggttattcagga

SEQ ID NO: 4606 - DNA, 296 bp, Aspergillus oryzae
tcgcagaccaaagcattggggaggatattgcttcgttcttccagaacaaggatacaagtgcctatgaccgtgcgctcgttattgtttcagatagcattaggaccaatgctcactacaaggagagagatgagaaatcagttctggaatggctccaggctcatggctatgcctgattgtcgacgagcgaagcggtctgttgttaacttgccatgtgaagatgaattagggtatcatcaccatattatactagcctactcctttcacccttactagtacacttgaaactatatgatgtc

SEQ ID NO: 4607 - DNA, 368 bp, Aspergillus oryzae
  modified_base (298)..(298): n is a, c, g, or t
  modified_base (326)..(326): n is a, c, g, or t
  modified_base (338)..(338): n is a, c, g, or t
ccaggcattggcggagtcggcgtggtggggtgggagaagtgatatggattcgatcgatgatttgaatgatgaggttatgcgtcgtatactggtgcagaggccgtatatgagtaagttggcggggtggtagtggttcttgttgggggacttgttgagctggctgattgttgttatagagcttgactatttggcggttcatcctaagaataaagggaaaggaattgcgacggtgcttgttgctgccggtgttagggcggcggaatcaatcggcttgccgactgttaccatgtcgtataangctggtcgtggggtgtatgcgcgtttangggtttgaggangtggatccgagtcattcaggatgactcgca

SEQ ID NO: 4608 - DNA, 188 bp, Aspergillus oryzae
cgaaccgaagacatcgccgccggaactaaagtctgcacttccaacttaaccaaagaaaaaaaaaaatgacaaccccggagccccagccaaagacatccgtcgccacagaaaaagtacacctcccacgcatcacgatcaaatactgcacacaatgtaaatggatgttgagggctgcttatttcgcccaa

SEQ ID NO: 4609 - DNA, 697 bp, Aspergillus oryzae
  modified_base (468)..(468): n is a, c, g, or t
  modified_base (492)..(492): n is a, c, g, or t
  modified_base (529)..(529): n is a, c, g, or t
  modified_base (543)..(543): n is a, c, g, or t
  modified_base (562)..(562): n is a, c, g, or t
  modified_base (613)..(613): n is a, c, g, or t
  modified_base (622)..(622): n is a, c, g, or t
  modified_base (631)..(631): n is a, c, g, or t
  modified_base (646)..(646): n is a, c, g, or t
cgagggttctcagtcagcagccatggtaccatgacccactcgtgctggagcttccctggagggcggatgttgaagaaaggactcgagcgctgataaggaaatcagctgacggttctccttcccttgcatttgctatcatgcgccacgatggcatggtccgacctcacccaccgatagcgagggctgtcgagatcgtcgaacagactttaaagcgattgggccataaggtgatcgagtggaaacctcctgcccaccaaattggcatagacatatttggtagggtctgcgtggctgatggtggagcggacatagcacaccatcttggattgtcgggagaaccaaaatctctccaatgtattgtgggggagggtattccacacatgagtgccctagaaatcgctgcactcaatgtggaaaagcggcaatatcaaaagctttacatggattactgggaacagtacggctganataaccggtaccgggcgcctgtcnacggtgtgatctgtccatgtgcgcccacacgctgcantgatccctcataantatgccatgttgggtatancgcgttcgttaatctcttggactaacacaacgtcgtgttcccggtaaccangcagacaanaagttgatntgctgaaccgaaaangattctgagtgagataaacaaaatgtcatgaacaatatgatctgaatgtac

SEQ ID NO: 4610 - DNA, 617 bp, Aspergillus oryzae
  modified_base (529)..(529): n is a, c, g, or t
tcggcacgaggcagaaggaagaacagaagcgccgcgcggaaaaagcaaagaggcaaaaaggcgagggtgaagaagaggatgaagcgacatctaccgacaaatccgacgacgagaatgaggatgaaagttccgacgaagatgaagaggttgcgatacccaaacacgaaactgtgaccggtgacgctcagtcgtctgatattgacaagtccaaccgcacggtgttcctaagcaatgtctccaatgaggccatcaagtccaagtccgccaagaagacccttttgaaacattttgaatcgttcctttctacactccctgaatctacgggacctcacaaagtggaatcgatacgtttccgttctacggccttcgcgagcgggggaaagatcccgaagcgggctgcctttgccaagcgcgaggttctgggatgaaaccactcctagtaccaacgcctatatcgtttatagtactgtccaggccgctcgaaaggctcctgttgccctgaacgggactgtcgtcctggatagacacntccgtgttgacagcgtcgcacatcccgccccggtcgataataaacggtgcgttttcgtcggcaacctcactttcgtggaacaggaagg

SEQ ID NO: 4611 - DNA, 589 bp, Aspergillus oryzae
tgaatgtactccaccttacttggggacctgaacacaaaacagtcacggttacaagctactctttggatagcgaatatgaccttcaatatgtcatctacgtccagttcctcgcggatatagaacaggacaagaccgccctcctggagaccgttgcacgcacattcactgctggtatcatctcccatcttcctgcgtccaaaacaatttactttgagttccggattcctggctcctcctccttgtcttctcttttatccgctccgcccaacgggtttgatgtcggtgcctcccatgagtttgagccgggtaccaccatgagggccctgcctctgattaaccgtgacttttctattcgtccgttgcctcatcacttctttactgtggtccttgataagccttcctgcattcaagaacctggtgtgctattttatactctctggaccgatcctcggcagtacattgagtcgcaaaccgccgatattattattgagactcggcggagcgctgggattcacgaagctgcaagaagcttgcaatgcttgcagtgggaagagaacaaccaagatagtgcaaggaagctcatacggga

SEQ ID NO: 4612 - DNA, 694 bp, Aspergillus oryzae
  modified_base (557)..(557): n is a, c, g, or t
  modified_base (587)..(587): n is a, c, g, or t
  modified_base (604)..(604): n is a, c, g, or t
attcggcacgaggccggccaaggccctctctgtcaagagcccatgcaaggaacagccgtcttcctagaagagataaccgtcaatgccaccgaagaagaacttgatctcggtcgcctgacaggcgaggcaatcagattagtccgtgagagcatctcccagggattcctcgactggagtccccggatcatgctcgcaatgtacagttgcgagattcaagcatctaccgaagtcctcggtcgtgtctatggtgtaataacccgacgccgcggccgcatcctctcagagaccatgaaagaaggaacacccttcttcacaatcctggcactgctccccgttgccgaatctttcggattcgccgaggaaatccgtaagcgtacctccggtgcagcgcaaccacagcttatcttcgccggttttcgagtctctcgacgaaagacccttctgggttccggctaccgaggaagagttggaggatctgggcgaattagccgatagggagaacgtggccaaccggtatatggatgctgtgagaagtcgaaagggactggtggttccangggaaggaagttgattgatgcggagaaacngaagacctgaagaaatnaaaacaagttctttgtttatgcttgggttggattatgctacgatagatgaagcattgggttttgtctttggtatacatgttcattcagtt

SEQ ID NO: 4613 - DNA, 711 bp, Aspergillus oryzae
  modified_base (623)..(623): n is a, c, g, or t
  modified_base (669)..(669): n is a, c, g, or t
ctgtctatccttgtgacagctacaaaaggcgatgtaaagcactcggttctgttcgatgcaggtccagaaggcgagatatgggagaggaatgtcaagcggttacggccggatctgtcttctgttgagctggttcaattatcccattggcatcgggaccattcgggtggccttgtccgagccattgaaatgatagctgaggccaaaaaagccaaaggccacacagacaaagtggcggtagatcttcatcctgaccgtcccgactatcggggattcgccctgggtccaaacattgtttcctttcaggcggatcctaccttcgaggaactcgaagctgctggcggagctatccaaaagcatgacgaggcacacaccgtgcttgacaatttctttctgatctctgggcgagattccccgccagacggcgtacgaaaacggtatcaaaggaggcatgcgctttgataaagaggaaaaggattggttttctgatgagcttatttcggatgaacgtttcctcgtgtgtaatcttaagggtaaaggatcgtcctgttcacaggctgcagtcatgcaggtgtcgtcaattgctcacgacatgcggtggaaagcttcgatggttctgttccgcnttatgcggttgttgggggcttcatcttgccctagcatgcggcgganacggaaagcactatcaaaaaacttgagagattagacctgctg

SEQ ID NO: 4614 - DNA, 714 bp, Aspergillus oryzae
  modified_base (468)..(468): n is a, c, g, or t
  modified_base (551)..(551): n is a, c, g, or t
  modified_base (612)..(612): n is a, c, g, or t
  modified_base (615)..(615): n is a, c, g, or t
  modified_base (664)..(664): n is a, c, g, or t
  modified_base (674)..(674): n is a, c, g, or t
tcggcacgaggaaactgtttatcggcggcctggcatggcacaccaccgacgagagtctccgttctggtttcgagaagtacggtgctgtcgaagaagctgttagtaatccaattaccgtacagcgatatcatctctcttcgtggttatattaataatctctagatcgtcgttaaggatcgtgacactggtcgcagtcgcggattcggattcgtccgcttcagctctgaggctgacgccgaagctgcggcgcatgaaatgaacaaccaggagtgagcattcatttatctactgtcatcccctctatcccacaatgctgtcgcaacttctccgcgttggatcgaaggtttacatatctaggtttgacggccgtactatccgcgtcgacaaagccagtgaacgagctcctcgcaacgatggcggcttccaatgccgtggcgggtacaaccagcgcggaagaaacggtgggangatacggaggatatggtggcggatctcgtggaagatatggtgacggcggtaagctgtcattctgcctggcctttacatccaanggcatcgcagttctctttaattggtgatcccatggggctaactgtgtatagactggcgcanaancgatggtaactaggctaaggccttgcctctaactaaacctggattgaantacggtgcanttggactggatcctttcgtgcttgtttaacggactcatcc

SEQ ID NO: 4615 - DNA, 494 bp, Aspergillus oryzae
gcacccaaagtcctcagttcctggcgcctccggccgtgacggccttacggcaggaggcccggagcatcgttccgagtttaaccccttcgaatcgctctctcagtgacgacaatgacatgcaggaagaacgtgcggagttgaaacaggcggcggagcagacgttgaacgtcattgttgacctggatctcgatggccgtatcaaatgggtcagtccgtcatggagacaggtcgtgggaaccgacccggagtcggtggagggtcggatgatttcggatcttattgtggacaacaagaatgcttttcaagatgcagttgaggccatgaaggaggatgattctcgaagtcgctttattcgcttctcgttgctgatgggtcccgactcggttctgaaatacgccccggaaccacgacctgtggaagcggaaactacaggaaccgatgaaactgaaggcgcaggcggccaggaagagcccttgcagagacggaggacccca

SEQ ID NO: 4616 - DNA, 312 bp, Aspergillus oryzae
tcggcacgaggcacttatcgaacacgtcggatctagcagaatactttccagactcagccgctcaagatcacgacggggaaccggggccagcgaggcaccggatattctaccattgcattcagtgactgctgtgggccagccttactatcgcaaggatgaaatatatgttggcaatccacgtcacaagtttgaagtcaccattagccacgagatcattcagcatactgagcctcaaaagccatacagccgtctatgagaatcgccgagcttgtatgtatattatctagtgaatggtacttctgataatttccg

SEQ ID NO: 4617 - DNA, 591 bp, Aspergillus oryzae
  modified_base (476)..(476): n is a, c, g, or t
tcggcacgaggagacgatggaggcgctccacgacgtcgttaagtccgggaaagtccggtatatcggtgcctcgtcaatgttcgcgcaccagctgttggagtaccagtacacggctcggatgaatggatggacggagttcatcaccatgcagaatctgtataacgctgcttatcgcgaggaggagcgggaaatgttccctgcgcttgagaagttcggaatgggatgtatcccgtggagtcctattgctatggggctgttggcaaggccgtggaatagcaacgatactgctcgcggggagtcgatgaaagggggactcctcgggaaccctctcaccgacgcggataagaagattaatgagaagattggagaaatagctgccagccgtggggtctccatggctactgttgcgcttgcttgggtgttgtcgaagcccttcattacctcgccgatcgtgggaatgagcaaaaaggaaagantggatgaagcgattcaggctattgagttcaagctcagttgaagaagagatcaagagtatcgatgacttgtacgaaccgaggaagatcatggggcacagctgaacgggtggattga

SEQ ID NO: 4618 - DNA, 595 bp, Aspergillus oryzae
  modified_base (528)..(528): n is a, c, g, or t
cccttgtcccgacatacgccattgagcccctaagggcaagctgccaattatcgccattctgccattggaattaaccttacaggagatgttgcggtaatgcagagcctttggtctcgggccgcctcggcgcgctcgtcttgtcattgcgtttcttgtctaagcacagcgactcccggactaacgtcacgggcggcatcagcagccagtaagagacggttacgaattggaaactcggtcacagcactatacacgagtatctttgcggcggcagctttagctgatgcccaagccaaagatcaacgacgccatgaatggcaggagaagatcgcagctgtgaaggaagaagtcaatgagttggtggacgaggaacaacgcattttgggcaaatatttcagcacggcggaagcggagatcattattcaatgggcgtattaacaagccgacaatacagcaccgttgccgggaccatcaccagggcaaatacgaagctccataagggatataccgacacgttcactcgccgccganacccactggcaagatacttatgagactcgacttagaaatggtctttgaaacttatccaatgagaatc

SEQ ID NO: 4619 - DNA, 288 bp, Aspergillus oryzae
  modified_base (269)..(269): n is a, c, g, or t
atgtatatttattttgagtacagagctctatcctggtaataatagatttcggatctccattgacgataataacacacgccgatagaccaacgcaatgcgatcgaggtacccactctacccacaaatataatcatgcaagccagaataccgcaaatcaggtataataataacaacgcccaaccaatccctaataaagcccaacccaaaaaaaaaaactcgagggggggcccggtaccagcttttgttccctttagtgagggttaatttcnagcttggcgtaatcatggt

SEQ ID NO: 4620 - DNA, 285 bp, Aspergillus oryzae
  modified_base (239)..(239): n is a, c, g, or t
caagaaggcgtggctctaccgtgctcgtccggcggttgctcatcagggattcgtatgtgaattcgactacattatgagggcaatgcggcatctcgtgctaaccgctgctcaacacagaaaaaccttccagacaaccccgacacagaggccactttcttgcccctgaaccgcgggttcacgtctccccaacccagctggcatggcatccattcgacatcccctccaacgaaacggtaganttcgtcgctggtctgaagaccgtcgctgggatctggagacccgact

SEQ ID NO: 4621 - DNA, 216 bp, Aspergillus oryzae
tttatgttacctatagggtctaggtggacacaaggtgtactttgcaaagggatggtggatgtgatacgatgcagctacccacaagaaattgtcagccctgtggcatttgagccagcgagttaggattgatttattccagaaaattatgccttgttggtgttactgtccaatttcgttcattgttcctacatgcgctctttatacatcattgcccga

SEQ ID NO: 4622 - DNA, 674 bp, Aspergillus oryzae
  modified_base (572)..(572): n is a, c, g, or t
gcacgagggcaccgcatccgtgctaccggctcctacattggtggtaccaacggttcctccaatggtattgttcccatgctccgggtgttcaacaacactgccagatatgtagaccagggaggaaacaagcgtccaggtgcttttgccatttacttggagccttggcacgccgatgtcttcgagttcctcgatctccgcaagaaccacggtaaagaggaagtgagagcccgcgatctcttctatgccctctggactccggacttgttcatgaagcgagttgaagccaacggcgactggactctcttctgtcctaacgaggcccctggcttggccgatgtttatggtgacgaatttgaggcactctatgaaagatacgaaaaggagggtcgtggccgcaagaccatcaaggcccagaagctctgggtatgctattctggaggctcagaccgagactggaaatcctttcatgctgtacaaggatgcctgtaacagaaagagcaaccagaagaactgggaacgatccgcagctccaacctctgtatgaaatcattgagtacactgctccggatgangttgctgtctgcaaccttgcctctcttgcctgcccaccttcttgatgctggcccgcggtgaatatgatttggcagctccacgaaattgtgcaggtatggttt

SEQ ID NO: 4623 - DNA, 557 bp, Aspergillus oryzae
  modified_base (450)..(450): n is a, c, g, or t
ttcggcacgaggctacgcgtttctatacactcgttaatttcttcgagttttattatcgcttcagcgtctttgttattttcaaaccgtcaagatgaagctcaacctcattgctctgacttctctggtcgccttgaccgcggcccagtcgactgactctacgtcggactctgccaccggcaccactgttgctccttcggcgactgtcagcttgtctcctcaacagtcctgcgctaagaagtgtacgttgccgtccttccttgcccttcttcctaaatgcattgcgaaactaaccaaatcaggcgacgcaaccgatctgtgctgcattgctggatgcttcgaggtcccctgccccaacgattctcaggctaacgacaccaacacttgcgtcgccgcctgcccccagggcagtggcaccccatctgacactgagcgctacgccgcctgccaganctcctgctacagcagccacttcttccctatcactgccacgggtaactctggagcctccaagaactctgccagcaactctgacgccaccacaccggtactggcaagga

SEQ ID NO: 4624 - DNA, 632 bp, Aspergillus oryzae
cacgagggccaaatggtctttgacgaagtgaatttctcccgccagagcctgtgccccggctatccgttcgtaatatctgccatgtttggcaaggtatatttgtggaagggaaaaggcagtgcagctgaagaggtcggagccgctcggttgattggcatggaccttggcttgaccggcgagttcgaagaggttgctgaagaagaagaaccagagagcttctttgagtgtttcccacagtatggggaatctgaggattacatgcgcccagattattggcgtttaaagcctaaccatgcatgttatcgcccaagactacttcgtattgaccatgagctcggccagcagcggccaacagggttctggctgcgccgggccaggttccgcatccccagtaatccgaccgaacgacactgtccaagagatcgagcctttctgccagaaggacatcaagaccaatggtatttatgtcttagataccttcttcgagatctatgtcattgtcggtgcacaagcgtccaaccgaccggcagatttcgtatcggccgtggtattcgcacatgaatatggcattttagctgcttcgctccaagaccggccattcattcctaaaaattttgtgtccttggcggctt

SEQ ID NO: 4625 - DNA, 548 bp, Aspergillus oryzae
tacaatggctactacggcttattctctcaactcttccacgaatgcgccaaatctttaggattagatcccgagactggccttgacatcactcgatgggacgttgtgcatgcgcaagaataccccaaattggaggatatagatgcgatcgtgcacactggatctaaacatgactccttcgaaaacgacccctggatcctcaaactagtcgaatacaccaagaaagccctcgaagaccaccgcgtcaagatcatcggcatctgcttcggacaccagatcatcggccgcgcgctcggcgttaaagtcggccgcggcgatgccggctgggagcttgcagtctgcaacatggacctgtcagaacaagggaagaaactcttcggaaaggataaactgcgcattcaccaaatgcaccgagatatcgtcttcaactgtcccacgaatgtgatcccgctcggttcctcttccaactgcgccatacagggcatgtaccggccgggcaaattcataacagtccagggtcatccggaattcaacgggttcatcgtcagcga

SEQ ID NO: 4626 - DNA, 514 bp, Aspergillus oryzae
  modified_base (17)..(17): n is a, c, g, or t
  modified_base (31)..(31): n is a, c, g, or t
  modified_base (39)..(39): n is a, c, g, or t
  modified_base (43)..(43): n is a, c, g, or t
tgcccttggggacgtcnctgtttagtaaggngactcagnagtngggcgaattggagctccaccgcggtggcggccgctctagaactagtggatcccccgggctgcaggaattcggcacgaggaagcctttttgaacttcggtgcaggctcgcgatcgtgtatcggaaaggcaatctccctgatggagatgcggaagattctccctcagctactgcgcgagttcgatatccacttgcatcagaacaagtcatggaagacgagaaatgtatggtttgtgcagcaggaggagttcatatgcgacttgacaccaagggtgcgttcgtgatagggtttcgcagggctttagcctgagcatgtcaaattcgatttatcttccgctgatagggcaccctgtacattgttctacatgagggtaaatggtaatagacatgcatctagggctgtctaggtttctagcttcacgtcctggcagataaatgtcattatctcctcggttggaaaaaaaaaaaaaaaa

SEQ ID NO: 4627 - DNA, 200 bp, Aspergillus oryzae
cggcacgaggcaagaatatccccgatgaaatatttgactatgatatctaactcgataacgcctttttaaccctccgtttcttggcctatacttcttcctttttattttattttttctttttttttctcccccttctcagatgatgatgactatgatgctttgttgtctgtccttaaaggagtcagggctctttttatctg

SEQ ID NO: 4628 - DNA, 476 bp, Aspergillus oryzae
  modified_base (344)..(344): n is a, c, g, or t
  modified_base (394)..(394): n is a, c, g, or t
aggggtacagtggcagctccaaacacaccaagcggtcgagtctttctacgttatcgctgtcggggaccaaaacattgtttgctggtcggtttggcgatgcattccggcggttcgaacagagcaaccaagaatccaaagctcagtctcccgccgccgaagagccgaagcaggtcatgatcacttcgtcggaattagtagaggtgcctgccgaaatgagtgatgccgaggaagacgacatctctccggagatgcgtcgggagctggagcgccgacttctctcccaggaggagaaaccgtcgccaacgctgctgccgagtatcgccgacaggtggcggaacgagganaggggggttttccgacccgggcccgatacacggtcgtcgatccagaaacnggtgcagttcattcttagaggaaaataacaagtcggctcctcccccgaaaaacggcacgggctatggccggttcacggaaga

SEQ ID NO: 4629 - DNA, 424 bp, Aspergillus oryzae
gggttatatccatgccgttatattctccgctcctttttcaccaagtgagccctacctaagagccatgcccctaggtgtcccggatgctgtttatcatggacccaccacatttattccacttacatatgatccctacactgcccccaaaagaatgagcattttcagagaaacaggtagccatgatttccagcatgtgaatgctggcgaaatagttgggaggatcctaaaaagccgtgaagcttatgaagagagacagcgggcgaagttgcagaagggtgtcattgaagagctgacgaaggctaaggaagactcaataaattaggcaagcgactctggtccacactacggggacgagctggatgtaagcattgctaacacttgttgactggatttgtatgccttgattcacataatagagactgga

SEQ ID NO: 4630 - DNA, 598 bp, Aspergillus oryzae
  modified_base (513)..(513): n is a, c, g, or t
  modified_base (536)..(536): n is a, c, g, or t
  modified_base (555)..(555): n is a, c, g, or t
  modified_base (566)..(566): n is a, c, g, or t
ttcggcacgaggttcaagtccgaaaaccccatggccgcggaaggtggattcctcaacgacatcaatcccgacagtgagacggtttactctgaggcccttgtaaactctggatttgacgaggttcgccgtcgtgctccttggccgcaggccgagggcgaaaagactcagtctgggccagaaggtgtccggttccaagccatgcgcgttgcatactttgcgatggactcggatagtactgaagactcagttgtgcttaaccggatcgtggcgctcaaggaagatgccaagaaggaagccgcgagctaaatgaagcagtaatatgttaccttttctcagggagacctgaaacaagacgaagtatgagattagagacaacgacaagacatcctgatatccacgactttgtgactcaaccaacgcctccctcactaaaagcatctccgtacagatagatatcgagagcatcacctgagcctggtcaagtcggtctgaatggaagcgctgaatgaaccngcgggcgacacgtaacatggggnactgggacctaaaacaaanaattatggtanaataactctcagcccacttgtcagggttatag

SEQ ID NO: 4631 - DNA, 393 bp, Aspergillus oryzae
ggcacgagggtttcattccgtcaaccgaccttgtgtatagccacttcgtccctcaacatcatcgcgtctttatctggccatttctctttgcgtgccttccttggtcgttagatataatcacgagtctttcattcaatcaaccccccacactcctacgacactttcgacaaccttgcaccttctcatctccgcgttgggtcacttctccaggctaccaagcttttgaacaaagaatctggaaacctttacatcgttggcggactatctgaaacttttcgaatttgtccgtctgtaacagaccgtcaacaaccgagatctgtaagcagtggcaggtgcagacaatagtgagccgtcgacgtcaaactacaacattgagaggagatagccaccgtc

SEQ ID NO: 4632 - DNA, 475 bp, Aspergillus oryzae
ggactttcttccttgcatacaggcaggcatccataaaaccattatcctcctctctggagatggaggaatcgtcgacgtagtcgacgcgatatacagtgctccgtggcattcaatcacccggcccaccattgtcttagtcccaacaggaactggaaatgcaatggctagctcactgggactcacgttatatccaacatcctggttgaaggagctgctgcgaggaagaccgaggcctttaccgaccttcggcgccaaattctcacccggcgcgcaatatgtcaccgaggaaggccgttctcgggctagtataagtgccaacatcaaaactaagtatgaagttccgatagtacatggtgcggttgttgcaagctggggcatacacgccgccttggttgccgatagtgatactactgaataccgcagattcggcgctgataggtttaaattgggctgcagaggaacttctcttcctcca

SEQ ID NO: 4633 - DNA, 353 bp, Aspergillus oryzae
ggtcaagattaaggagaccttgttttaatatggatcgattagaaaaactgagcctcgtgtttctattactttcaacaactaccctgtccgcttttcgctcctagagcctgtaccactccttatctacggggtttttccctccattggtcctgggtatagaaccttctgtcattggtcgcctgtccgtctctctgctctttttgttctttcgatatcttagagggattcaggggagtaatgatgaagacaggagacggtcgacatatagatgtataccttttgtatgtccgttacttgtatctacatagtctttttctgggtatattcacatgcgattccttttgtccgttcat

SEQ ID NO: 4634 - DNA, 259 bp, Aspergillus oryzae
ggcacgaggcagagaaagcccttggaagggcctcacagaattgacaaataaagctggtgcacactgctctgactcggctcccacgcaagcatggtcggcagggtgcttgttagatctttactacgatgcttcaagatatgccttgaaaacagcgtagaagcaaggttttccattggacaatggcattatagatgggtatacacgtacatacttgtgtaaggtgctcgttgaagatatggcttgccgtagaataaatata

SEQ ID NO: 4635 - DNA, 600 bp, Aspergillus oryzae
attcggcacgaggcacaagagcagcagtctctaccagaagcagctgaaggacctcatccgggttgtccgccaggagggctacgaatactccgaccccatcaccgactttgtcaaggctttatacatcgacttcgatttcgaggaggcccagaagaagctgggtgaggccgaggatgtgttgaggagcgatttcttcctcgtctctgcggccgatgctttcgtcgaggctgcccgtcaccttatctccgagagctactgcaagatccaccaacggattgatatcaaggatctttccacccgtctcggcctgaaccaggatgagggtgagaagtggattgtcaacctcatccgcgataccagagtcgatgccaagattgattataaggaaggcacagtgatcatgaaccacccccctcagtcggtgtaccagcaggttattgagaagaacaagggcgccttcttccggacacaagtcttgagtgcggccgtcgcaaaataaacacacgttatgctataaaacaagaattctcttttaccgttctcttgttggttctgttcatgtttagtattcccccgcggattgtgggcttctttgagtga

SEQ ID NO: 4636 - DNA, 653 bp, Aspergillus oryzae
  modified_base (567)..(567): n is a, c, g, or t
  modified_base (601)..(601): n is a, c, g, or t
aattcggcacgaggcgatctcggataacgtctggttgatcggagaagacaaaacactcaaccccaagacgtacttcatcgtcataccggcgctctttgggaatggccagtcaacctcgccatccaactattccgcttccgatgtatttccggcatgttcgttctatgacaacgtgcgcgcccaatacacactggtcacacagcacctaggcataacgcatctgcacgctgtagttgggtggtccatgggtgcggcccaaagctatcagtgggcgacgcagtacccagacttcatggatttggtagtgccattctgcgggtcagcaaggacctccttgcataaccaagtgttcttggagggggtgaaaggtgcgctgttagcagcaaaacacacgccttctgctgtcctgagagatactcgttcccccgaggctggacaggagtcaagaatatggaataacaaggagaagcaaatcgggttgaaagccttgggtagggtttatgctggttggggatttagccaagctttctacagagaaaactgtatgagactgcattggctacaaancctggaagaattcatgcaaggtttctgggaaaantgggctctctccaaaaacctgaaaattgttggccatctgcaacatggcagca

SEQ ID NO: 4637 - DNA, 626 bp, Aspergillus oryzae
  modified_base (507)..(507): n is a, c, g, or t
  modified_base (545)..(545): n is a, c, g, or t
  modified_base (587)..(587): n is a, c, g, or t
ggcacgaggggatacctagctgccggaagtgggaaagaggagcttgagcagatcataatgggtctcgcgtataacgtctacctcacttccaataagatctttggatgcaagcagtgcaagacgcaccttgcggattatgacgatatcatcagcagaaacttccgtggccagcacggcaaagcgtatctattcaacaacgtcgtcaacatcacgcaatccgaagcggtggagcgtagcatgaccactgggaggcatatcgttcgagacatcgcttgcagacaatgcagggaaacggtagggtggaagtacgacaaggcatatgagaccagcgagaagtacaaggagggcaaattcattctagaagaagagcttctgtgcgtggtgtgctaaggtgcctcctcttcatgaacgtgggcgtgcgtccttaagaagcgtacggtaatatgacgggtccagttactgtgaggcctccagagaaggacttgcagcgaccttacaaagactganttatacagtgagcgtttcaatcgtggcgtaaggcaaangcgttgaatggtgcactatgttttgctttgaccgactttganaacgggtttccagcacaccagttttcgcgtatcaagtta

SEQ ID NO: 4638 - DNA, 522 bp, Aspergillus oryzae
  modified_base (434)..(434): n is a, c, g, or t
  modified_base (465)..(465): n is a, c, g, or t
aattcggcacgagggttcatggcaaaccatcggtgcggacctggacgatccttatgagcgccttcaccttcaataaacagccacttgccgcggagaaggttcgggagatgatggccaaacacggagtagaatacaaccaggttacctggaacacggtcatcaacacctatgcaaacgcgcagaatattgcggaggttgcaaagtctatcaaggccatggaagctcaaggctattcgatggattcatatacaatgaaatgtctccgctacctccaagatccagagcgcctatggattgcggtagaagaactggaccaggcgaccgatgctcgccacgatatggtgacctccttggatcagaggcctttagagcatgaatcggatgaagatgagcatctgttggagcaaggcttgcgacgtctgagtgaaagaaangagtctacccgttgagatacccttatcgaancatttattttctattgtctttctatcttgttgcatttagagcgtgggttctggaaaa

SEQ ID NO: 4639 - DNA, 430 bp, Aspergillus oryzae
  modified_base (11)..(11): n is a, c, g, or t
  modified_base (23)..(23): n is a, c, g, or t
gtgttttgtgntacgactcaggntagggcgaattggagctccaccgcggtggcggccgctctagaactagtggatcccccgggctgcaggaattcggcacgaggatagcaacaagaagggaccatatggagaatacggtcttcaatagagatcattgtgcgtactaggtgtgtgggtagtgtcagtatgcagaccctatttgttacacgtggcggctcactgtctttgagaattgaaacattctcaacgcataatctacggcgttgtacagcccccaagccatgggcggtgtgcaagctaggcttgctagttcgaaacaccagaaaatgacatctggatgacctggggcagtgcttttattcctaatcagcacattgcagccgcagcccttggtacgtaacattcagtgagcaacgccaaaaaaaaaaaa

SEQ ID NO: 4640 - DNA, 418 bp, Aspergillus oryzae
aattcggcacgagggggcggccaagacactgctgaactccagcgtcagctcggcggaaacagcaaggtcgatgttcctttccagtacctcactttcttcctggaggatgatgaagagcttgagcgcattcgtactgcatatgagaagggagagatgctcactggcgaaatgaagcagaggtgtattgctgagcttcaaacctatgttaaaggtttccaagagcgcagggcccaggtaaccgaggagatgctcaaggagtatatgagtactcgtccactagagtggaagggtaaccccaacccaattgttgtcgagaagaaataaggcaagtggtactttcgagccactgcagttttagacgaatttgtttagagatgcattatcctgcagctacacgatcaatgaccaccacacaatg

SEQ ID NO: 4641 - DNA, 246 bp, Aspergillus oryzae
aattcggcacgagggccaactaaacgataagttatgagaatgatggtacattgcgcttgtttttctcacggcttctcaacgatgacggcatcggcacggtatgaaactatgagatatgccggcattcacgattatgactcgcattaaagccattagcgactacgatcgttctattcattcttgttttccgtctcggtcttctctacgtatttttttttttatttcttgtttttgccagtctagcct

SEQ ID NO: 4642 - DNA, 686 bp, Aspergillus oryzae
  modified_base (576)..(576): n is a, c, g, or t
aattcggcacgaggatcattcgcttgccttgatcctggctctgtcgagatctacttgacataatgcgcaatacccggccgtcccctatggtccgcaaattccttcgcgccaacgcctcagcagacccgccaaggccgtcgttgttgccctcatctgacaattctgccgagaattcctggcctcaagaccctatccgagatgaatattgtttcttctacgggacattaatggatccaaatacattatgcaaagtcttaggatcgtcaaagccaccacctataatgcgccctgctaggattattggttacgaaatcaaactttggggcccataccctgctctcctcgataaaccacttcatccagtcgatgggaatggtgtgtggtctcttatcgccgaggcaacttgatcgacttgccgcctacgaaacggataaatgtcgtcttagatcttgcttgattaacgttctgaataatgacggtggcgccgagaaaaccatcgagggagtttctttcatgtggaatggtcgacaggatgaacttcgagagggtacttttgacctgaagcaatgggggaanggacagaaagctacgtgaattgggctggagaattacagaaatgttcaggtttgttattcgatgcttacgttcagtgctgggcctatacacgaaaagtaagtttggcttaa

SEQ ID NO: 4643 - DNA, 175 bp, Aspergillus oryzae
aattcggcacgaggctgattttgaggaatgttgttcgaattggaattgtgactactttctcttttctcttctttctttccttctttatctttcctctgttgttttagagccagtacagcatcagtggcctatagaaatgagcatcattgcatggctggcccatgttcgaacatat

SEQ ID NO: 4644 - DNA, 530 bp, Aspergillus oryzae
  modified_base (487)..(487): n is a, c, g, or t
aattcggcacgaggcgatctcgctttggggtctccccttttggtgatgacgatcagaatgacagcagtgatggtgaagacgatggactggtggaaatcctagttccagggaagaagtcttgagtgacaccgtgatcgtgaagtcattctaagccttggggccagccgttgattgaagtgttggaggggtcgtgtttggcaacctggcgaaacgagtcctccgaaaaattgtacactactgactgcatagcgcttacagactctagcacgttgagaagacttagcgttggttagactgctgtgacttctggctggagcatttgggattcgctactagaggttgggtaacattgggttttctgtcctgcagtgtttccgaaaagaagcatcggtctcttgcggaatggtgatttctttgtctttattttcttcgtcttttttttttccctttttcttgggacgcttcgttggcgttttgtttgttgttnacatctatctgtgtctttggtgggaggattctttttcagcaga

SEQ ID NO: 4645 - DNA, 334 bp, Aspergillus oryzae
ctgttttgtggtacgactcagggtagggcgaattggagctccaccgcggtggcggccgctctagaactagtggatcccccgggctgcaggaatttggcacgagggacggatccgatgtcgtttcatgtggcttggtgggcttcggggattgtgctggggacggtggtggtttatgcggcgcattattatacgatttatgtggataataagtgtgtggcgttgacgaagaggattgagaagtggttgacttcttgagttttgtctttgtctttcgggtttcggatttgtatgtgagggtttatatttaatatattgatattttatttatgaaaaa

SEQ ID NO: 4646 - DNA, 698 bp, Aspergillus oryzae
  modified_base (531)..(531): n is a, c, g, or t
  modified_base (610)..(610): n is a, c, g, or t
  modified_base (629)..(629): n is a, c, g, or t
tcggcacgagggttatttcttattttttggctttgatccccatctctctcttctctctctttcttttacttcatcatctgtctcccggtacctttgatcgtgatcgtcccgaatccaaaaagggttggctcgtatcgaccagaggttcctgtccttccttctatcagatataactataccgtacattcacactcagaagcccagaagacgttgcatattttataaaccctaattcggactgcactcttctgccttcagtcattcattcatccagaacaagagacatctacattcattcaacctacagtgctcgacatctatcattagcaccaagctgcctcgacatcaatctgggaacatcctgacttagactaaacatacttaataatacccaagaagttaagcagtgttcgcttgatcctcatcacattcatcattgtcacaatggacgctacatacaccatggcaccaacggtgcaaggacaaccatcatttgcatactacccactgctgattcccaaagacacaatncacaagccacccggctgaaccccagccatactatgggacagatttcaggcctttccctcagcaacactgcctcccagancaacaaccggtctacaatnctcaaaccatgatgaaacatgcatcagaatggctaccaccaatgccttccgcggaacaatgaaacatga

SEQ ID NO: 4647 - DNA, 230 bp, Aspergillus oryzae
aattcggcacgagggttgcgagtgtcgcaggatagcttcaggtgatgacctgattgatgtttaacttgtgatcatgtgcagcctgatatggattcttgagataccaccgatggacggttccaccggataagttccagcagtgtttggaattgttctagactcgtctcttttgtacttttcctttgttgatagttttgtttagcttgaatgcacatgatgtctattcttgt

SEQ ID NO: 4648 - DNA, 683 bp, Aspergillus oryzae
  modified_base (481)..(481): n is a, c, g, or t
  modified_base (636)..(636): n is a, c, g, or t
tcggcacgaggcctctcctccctcctcccctctcacccctccacaatgctctccggtatcctaattttcaaccaaaaaggcgaaaacctcatcttccgtgccttccgcaatgactgccgcccccggttggccgacatcttccgcatccaagtcatctccaacccgcaagttcgctcgcccattctcacgctaggatccacgacgttcagccatgtgaagcacgaaaatatctatctggtagcggtgaccaagagcaacgccaatgcggcgctcgtgttcgagtttttgtatcggttggtgatgctggggaagagctactttgggaaattcgacgaggaggcggttaagaataatttcgttttggtttatgagctgctggatgagatcctcgacttcggatacccccaaaacacggaaacagacactctgaagatgtacatcacgacggagggagtcaaatccgccatcgtcaacaaccccnccgactcaagccgcatcaccatgcaagcaccggcgcgctctcctgggcgccgctccgatatcaaataccgcaagaacgaagcctttgttgacgtgatcgaagatgtcaatcttttaatgtccgcgactggcaccgtactccgcgccgacttcaangccaaatcgtcattgcgcgcctaacttctccggcacaccgggaatgc

SEQ ID NO: 4649 - DNA, 495 bp, Aspergillus oryzae
  modified_base (296)..(296): n is a, c, g, or t
  modified_base (380)..(380): n is a, c, g, or t
  modified_base (385)..(385): n is a, c, g, or t
  modified_base (402)..(402): n is a, c, g, or t
  modified_base (433)..(433): n is a, c, g, or t
  modified_base (461)..(461): n is a, c, g, or t
cgagggttaccttttcctaccataagctgctcaccttttattgtatctcctccatcattatgggtgtcctgaaggtcttgctcaaagcgatcctcattcccatcgttctcctgctggtcatctcggtcgtcgcgttcctcctcatcaaaaggcaccgaagccggaaggagaaagaaaggcaactcgagaatgggttccagcccccgcccattgtgcaatgggttccgcatcaggaccccatacaaaagccggctccgattgcccatacgtcccacctgcaaccgggtggctgaaancattttgaatgccacaacattgggtagattatctttctatcgtatacaaccggctggcttgggatatcgttgttgtgcagggtnttcangaatactgttgttgaanaatgatgacgggcttgaaattgaagcgttantggatatggtttgttctgctttgttgantcgttttcaatttgtttcccttgctaggtaaatc

SEQ ID NO: 4650 - DNA, 402 bp, Aspergillus oryzae
ggaatttggcacgagggagaaactcaaggctctgggctacgagctcgaattacctcagttgaagagtgtcgacgaggtccctattcaacaggaagagaataagacgattgaggcgtcggagacagtattcgacgaacctgtcaaggctattgaagcgccaaaggaggagaaaaaggttgctgatgataccccaaagaaagctaagaaggacaagaagaagggcgcacaatcaaccgaccaggagacaccaaaggagcaacccaagaaggagatccctgcagcaactgcttcgcctgccaccaaggctggagcaaaggctaagaaggcgaaaaagaccaaggccaaggcgtaaattccagtttaaaattctctgtaactttcatagcatagattatgttttct

SEQ ID NO: 4651 - DNA, 545 bp, Aspergillus oryzae
aattcggcacgaggattgcctctggcagcggtcgtttgaggaaggctcttcctcctccggcaatagtgttgtaagcagttccaacggctattctagccctgttgagaatggctctaccattgactcacccaagtctccgttgtcggatgacggcgtttcctccacgaccagctatggcttgcgtgcgattcgcccagcgccacccacgccagcactcttcagtgaccccggttgggacaagatcaacaatactatactgtcaacctcaaactgcggaaatccatgtctgcggcattttggcttcggtccaacgtctgcggatggcttcggaattggctatatcatcaaagatgactcgatctcgttctgcgcctcgtccaagcaccgtcagaccgctcgatttttgtacacactcgaatcgtatttgtttgaaatccgaaagctgctacgcgccaccaaccgtacgacggccagtccgcgaaccagtcgggctcgggaaatggagatcatcgccgaacggctccaaggggatcaccgtcggggcc

SEQ ID NO: 4652 - DNA, 279 bp, Aspergillus oryzae
aattcggcacgagggcaggaggtcatgtcgggttgactcccttgcagcatggatcttactactaatgggcgggacctcatgactacttcactactggatattcaagcgtttgggtgcttagaggtatacggattccttcacatagttcacgtttccctttactttcttgcgtttctctcatgttccacgttttcagcggccagatgactatttatattatttatcacttcataccgtgtacagattaccatttcttctttttgttgtcaatgacaaaaa

SEQ ID NO: 4653 - DNA, 515 bp, Aspergillus oryzae
  modified_base (429)..(429): n is a, c, g, or t
tcggcacgaggaagtacaagtcacgcaatgataccgtacaccgcgcagcgatggagaattgtgcactggaacatgaggatttgacactgtgtttccagaacggtaacctgcagaaacgactaatgtctcgtatgactctgtgctccgaggaaaatgggaaattctctcggtgctttactactcaggctaaattcctccaggcattgggctactcatcttcgtttgaatgggatgacgagagagaggaaaagatccagatgcacgccgataaactctaccatgagatgctggattatgagaagaaagttgaggaggcccgagcggctggccaggaacctccgcctctcacatccctcttcaatccccagggaaaaaccccaacagcagaaagccgaaaatacctcaggctccctggaaaattcccgggangcgaagccattccaccggggttcaagccatccaagccattggaacaactcacaccacatgaaacgcgaactggaaatccgaaccca

SEQ ID NO: 4654 - DNA, 310 bp, Aspergillus oryzae
aattcggcacgaggccaaaaaggctgacaagggcgaggagaagaagcgcaagcggtccgacgacaatgaggacaacgagaagaaacagaagaagaagaagaagaaggacgagtaaatcatgtcaaaaagttaaaactgatggatcgctacattattgtatgatatcacactttgtgggttcaattttcttgtcatttgcttgaagactttctattttctgggtggcatttataggatggattggttcatctatccatggcgcagcggtgcttgttggtaaaggcagttaggtctaatcttgatattatcc

SEQ ID NO: 4655 - DNA, 592 bp, Aspergillus oryzae
  modified_base (540)..(540): n is a, c, g, or t
aattcggcacgaggcctcagttgaccgctcagctgcccacctggctgtcctcctgggagttggatgaggaagaggctcagcgcctgcacctcgctgttgcagacgccgctcaggctgccggcgatccggagctggcgcagacccatattctgcaggctctgcagaccattccagccgcgcaggcttcgtccaaggaggcccgcgacctcgccatccgcgctctcacctccgctctcacccaccccgctgtgttcgacttcacccctctgacggcctcggacgctgtccaggcccttcgctctagcgatagcaccttgtttgagcttcttgagatcttcacggccgacactctcgatgcttacgaggctttcgtcaccgccactcccttggcaggcatctccggtggtgtgctggccgacgctggcgaggcgctgcagaacaagatgcgtctgttgactttggcctctctggccgcctcgaccccttcccgttccttgccctatgccacgattgccgcgtctctgcgtgtgccggccgaanatgtcgaaaaatgggtcatcgatacaatccgtgctggtctggttgaaggcaa

SEQ ID NO: 4656 - DNA, 511 bp, Aspergillus oryzae
  modified_base (134)..(134): n is a, c, g, or t
  modified_base (370)..(370): n is a, c, g, or t
  modified_base (399)..(399): n is a, c, g, or t
  modified_base (402)..(402): n is a, c, g, or t
  modified_base (433)..(433): n is a, c, g, or t
  modified_base (444)..(444): n is a, c, g, or t
  modified_base (462)..(462): n is a, c, g, or t
cggcacgagggggaacaacaccacacaaacccacacaatggccaataattccgagcacactcttttccggttcttaaaagctgctctgcagacacaccaccggtttctctctggcgcattgacacgcgcagaancacccgtctacgtcatcggcaatccctccgcggacctcgactctatcatctccgcgataacctactcatacttcgccaacaacactgaccggcaccatgttcccctgataaacctaccgaacgttccatcgggctctgagctgcaccggttgcgaccggagttcgtcaaagctttatggttgtcaactcaccccccggcgcgaggtgagcaaccatgggaggagacacccgaatcngccggggcgatcctccacgaccatatccntcnccgtggcagatttcaacgcacacatggaggnagaaaggaaangttaacgaaaaatatcanataagcgccgatgcggttcttgtagactggaatgcactgcccaaacgac

SEQ ID NO: 4657 - DNA, 369 bp, Aspergillus oryzae
  modified_base (321)..(321): n is a, c, g, or t
  modified_base (344)..(344): n is a, c, g, or t
  modified_base (347)..(347): n is a, c, g, or t
aattcggcacgaggtgttctgggacttttcggagcgaagcctctagtaatgggacgagctgatgcactgtcggaccgtcttcaaagtcgatagccctctgcacgatcttggccaggtcttcaataggaggctgaagctggccgtccgcgactgcccacagtcgcttcatcaggaaaggctgccccagatgacaacttgcatcgaagctataccgactgtaatttccagcgcggtgctggcaagtcctcgagttcctgctcctcgtctatagagaaactctaccgtatctatgcagtgttggacatgctctttgccgtgtangcagagcctctgccagagccctntanccgagtaatccagggcacacca

SEQ ID NO: 4658 - DNA, 275 bp, Aspergillus oryzae
aattcggcacgaggatagaccccaacttcaatgatgctgatgtgtagttttgtaacagctgggtgatgatagttagctactggtcttgtcataagataaggcacagttgggatgtgtagatatcaatagcttgtatatagaatatgcagccaatgtggtaaatctctgggattaagtgggtagtttcacatatttctatatttgcacatctagcggtgaaaaccagcggctgtgctcatgtgagatgataaaatggcatggtaagattcaggtct

SEQ ID NO: 4659 - DNA, 625 bp, Aspergillus oryzae
agggaacgttgaagaaccattcaagaaggccagcccgaaattctcgaacatctctgcacttgacgagatttacctcaagtcggatcaagtctgccgcctgtctgtgttgaccctaatatacagagctatccctgcagctgtggatagtcggagtacatttgtagacgactgcattgagacagcacgagtgacactggaactacaccaaagctgcatgacgatgatggaggaaggtaacagaagtaacgaagtcaagtgttcgtacctacactggacgataatgtactcgccattcgtgccgttcatcgttctgttttgtcatgttattgaatcctcgtcctactcagacctgatacgattggaagattttgtcaattcgctccagcccaactgttccttgtcggaggctattgcgaaaatgcaccgactctgccaggtcctcagcaacgttgccagactatatgtcgaggcaaaagcgcaagcccagacgcaagagaacgaagactggcgtctgtgggccaagaatttgatgtttatcttagtgctcttggcttagcacctacacaggccgaagccggtgatgttcgatggaatggacctgttcctgtgccgggactatccccaa

SEQ ID NO: 4660 - DNA, 433 bp, Aspergillus oryzae
cgaggcccatcccagccggaccgccgcttttactaaggaatatgcggaggcagtccgcgaagtcggcgcctctctcggtgtccccgtagtggatgtatggaaggcatttatgtctgctgttggctggaaggagggcgagccactaccgggctcaagagatttgccaaatctggatcaatttgcgcgatttttcactgatgggctacatttgacggcagatggatatcgggtactgtttgatgcgattatggaaacgattcgagcgaagtggccggaggaagaacctactgcaatggatatggttcatcccgcatggccggaggcgccaaggtagagagatatgcagtggcaacggatggagatccgcacgggtcgatagtttaccacgttctagagcgattgtcacctgggaatagaaagactaaattcctgt

SEQ ID NO: 4661 - DNA, 499 bp, Aspergillus oryzae
tcggggtcagcaacagatgtttctggtgagtatgtagagaagaaaggctatacttactagcaatagcagcgacacaacccaaaacaaccccgattataatctgatcggtggctgggtcactcgagcgagtcaccagtgaccttcggcagagagggagaaacatggtgcaagcttgcggggtaagatggaatggatcgctggccgagagaaaaacacttgagcttcccccctcccgttgagttcagttcaagaagagcggagacaccccccattaagaactcaagttcacctccagcctcgtttcaagatagcttgtttgagatcattttaagttccggtcagggcatctgctccagcgttgagtcgcggctagccagcgtgacaatatgcagtgtatccagcaagcaccagtctgtaacagaagcaataaccccaaaaatagaaggatttcggcgattgcagaatcattggctgtcgatgctcggttttcggactgcaa

SEQ ID NO: 4662 - DNA, 612 bp, Aspergillus oryzae
attcggcacgaggatgctcttcgcgacattcctcgttaccttccccacagactgcctcgtcatctgggcggccatctaccacggcgccaaagagtgggaccgctcacccctggtgcagcgcaatctcctctggtactatgtgatcgggacggggatcgctgttgccctgcacatgtgcgctgcgtcggagctgggggttgaaaaggcattctttgccggtgcgattgggtgtcaggcggtgttgagtgtaggttatcttgggaatttgattcaaatggggagtacaagggggttttcaatgcatctgtggttcttccgcttcacaggctccctaaccctcgtccccgaattctacctgcgggtgaaatactggcccgagaggttcggcttcctgggccagcccctcatgctctggtgctgcgctgtcttcctgggatttgatctggtctacgggatcttattctggtatattcgacgacaggaacgcgagacggggatgctgcttgctgatgggcggaagaagaagtgaatattatctctagataagtaagaaggggagatgcggtgatcgattggtttggatgggtttgccggcttggaatttaaatccct

SEQ ID NO: 4663 - DNA, 525 bp, Aspergillus oryzae
  modified_base (349)..(349): n is a, c, g, or t
attcggcacgaggcatttcttggctcgccggagagtccatcttgcaaccttcctgcgaccgccacgccatcgaacggtggccagccagtgatcatgaatagcgctcgtcttatactttcagagcgcctccacataattccgtgcagatatccaattactaccccagaatcgaagcgacgtcatctcacagaagatcggcagcgcatcgaacatggcgataggacgcgggaactttttaaactatgcccagactatgattagtggcacgaaccaccattgttagtgtgtcgcttcgtctctcgtgatttgctcgagggaccgccatacccctcccagtcttctagtcganacaaacctgaccctttgttttggttgaccgctgcctgggacaatttcctcttctcacgcacttcgacataacattatttgatctcgcaacactcgaatgaccgcaggaaaatgcgattagccttgagcgccccgtcaccccccgtgctgagccgggcaaaacactttgtccgggca

SEQ ID NO: 4664 - DNA, 479 bp, Aspergillus oryzae
  modified_base (371)..(371): n is a, c, g, or t
gaatgcatccgaaacgatcatctgccctttatttgaaaagagcgagtgattcctgggatctgccggtcttggcgattgccagatgaacgagaagctctttggtcaatcaacgaatcgtacgtcatccatcttagcgccacgagccggatcactttcctatgcccaacatggaaggccgtatccaaactggagcgtgggtgtagccctctcggatcttggacggagcccttgaaaccatgggtggtgctgaccacgaggcaggtagatcgactccacatgcgaatgggctcgttcaagactaactacgattcgttgggccgaagcggaaaagattcggagggtccataaaggttgcccagcttatcgagaancggcagaagtttgttggaccaacaagatcccgagagttaagttaataagaaatcgccattagtactggggagaatgaccaagggatggggggaaacgaaggggtggtc

SEQ ID NO: 4665 - DNA, 421 bp, Aspergillus oryzae
  modified_base (291)..(291): n is a, c, g, or t
cgtcgaagctcgcgggacccggtaaaccgcagtgtcgacttgcacccaggaaacgggcatgtcacagcaccgggtcctacaacttcaaggtcgctgatctgcatccatcggggctccgggtcggccctatccgtcaagtcagaagatcaaagggaccgaacttgttcgtttcgtcgtgttctggagaaggatctataggtagcagcccggggctcgccatcgacagaacatcacgcgatgattctggagaattttgacggttaaagagcggaagagccatccatgtttcanccattttcagacgcggtacagatacactcgatcggccgttttaggtgagactcgtgggcatatataccctggtcccctagaaatatgggaagcacattgccgtgtttcatgtcatccttgataagcaaca

SEQ ID NO: 4666 - DNA, 604 bp, Aspergillus oryzae
  modified_base (471)..(471): n is a, c, g, or t
accgcccgacctacgaatctgcttcgactcgtaagttccaggagggccgtaccgagactatccgtagcgtttccgacgacagtgtggccttctgcaaggcccagagcgacccctcagtgccccgggaggaggttgtgcgcctcttccgcaccgccctggcctcccactccaagtacaccgcggaggctagtgatggtcgcggtgtcgaccgccacctgtttggtttaaagaaggtgctcaaggagggtgagaagctgccggccttgtacgaggacccggcatacagctacagcagctcgtggtacctctcgaccagccagctgagttcggaattcttcaacggatacggatggagtcaggtgatcgacgatgggattcggtattgcatacatgatcaacgagaacagcctcaacttcaacatcgtctgcaagcgcatcggcgctgagcgcatgagctactacttgaacgangctgcctcagactgcgggatctgctgatgcccgacctggccgcccagaccgagaaagccaagctttaagccgcatgtagaatataatagatatgtaaatgacagaaccatagattggttttcttttctctttc

SEQ ID NO: 4667 - DNA, 511 bp, Aspergillus oryzae
aactggcccgaggagatgttgatccccggaggatgttgagcttggtcaatgatccgcggaatgagtacagccgactgttgacagtcgataaactgggtaatgtggtgggaggacgtccgatcacgtacgtcaatgtggacatgaagacgatcaaagccgctgcgattgcaatgcttcgtgcagggcaccctgttttctttggctgcgatgttggaaaattctacgatgccaagcttggggtgatggatcagtggctactggacgtcagattgggattcaacaccacactgcgcatggataaggcacaaagactgaaaaccggcgagtcatccatgacccatgcgatggtgctgacaggcgttcatgtcgagaagggccaaccagtgcgatggcgggtgcagaactcctggggtgaaccgtgggagacaaggggtggtttgtcatggcagatgagtggatggacgagtttacgtatcaggtagtggttgactctcgcttcgttttcaaagga

SEQ ID NO: 4668 - DNA, 553 bp, Aspergillus oryzae
  modified_base (29)..(29): n is a, c, g, or t
  modified_base (101)..(101): n is a, c, g, or t
  modified_base (458)..(458): n is a, c, g, or t
gtcacgacgtttgccaagtcacgacgttntccaattcagcacgatttgtcccgatgtcaacgtcagcgcagtgcgggcctatctcttctcgactgatgtgnatatcttccaagagtatgagcaagatttggagatccgtaagagattcgaagaagccgcggcatcagagctgcagcaaggctgggaccacggcagcaagaagtctagccttgagctggcacgcgaagcggaaatggaggcacgggagaaacaagtacaagaactgctctcccggccgagagtgatgaccaagacaggatctggtccgatgggaacggagacggaggtggaattggccggttacaacagcagcgctgaccatgttgccgaccgttcgaatccgatgacagaagatgaggtgatgaacactcctcgacgatcggttgagattcacgagttgtttacgaagggcttcggancgatccggaagggacagttgtagggattcccttcgcgtacattgttattgtttttgaatcataccatgtcattgaatctttcttttctcaaaagc

SEQ ID NO: 4669 - DNA, 260 bp, Aspergillus oryzae
gctgtcggctcaggccttcgagagaaggcacccagccccggcgctggtggaacacctttcaagagcactttggaccaataccataaccccggtcctgtcaatgccgcatcgaatttctaaacgagccaggtgcttgtcactccccggcggttttaacgtggcagccttctttggccgtacctggccctttcaatttacaatttagatgtgggcacagtacatgatggtccagtggttttgacactgtaaagtttgtacga

SEQ ID NO: 4670 - DNA, 555 bp, Aspergillus oryzae
  modified_base (422)..(422): n is a, c, g, or t
  modified_base (458)..(458): n is a, c, g, or t
gagggaaagtgaaggcatacaacgatgccaaccgtcaagtggccattctctgtaaccacaagcgaactgtgactgcgtctcacgctaatcaaatggagaagatgggcgagaggataaaaggtctccgttaccaaagatggcgcctcaagcagcagatgcttgatctggaacctaatcttaagaaaaagaagggagctaagttcttcgagatggatgaggatattgacatggagtggatcaaggagcaccaggctttcttactcgaagaacaacgccaaaagatccagaagaagttcgacaaggataacgagaagcttgcggcagaaggggagaaggaaatgaaggccaaggaacttgaaaatcgggctggaagtggtcaaaagatatggaaaagaagttcaacaaagagaacaagacaggcnaagtggaagctgaaggcaaaggcccccacagttganaaacttgagaacgccatccagaaacttgacagcgtattgagaccatggaattgcaggctcaggacaaggaagacaataaggaattggccctcggaac

SEQ ID NO: 4671 - DNA, 260 bp, Aspergillus oryzae
gcacgaggcccaacccatgaaccagaactacccggtgatgaatggtaacgggactccccagggctttcccgtggcgggcagtcacccaggaatggacgcgctaagtcgagagctgaacaccatcgatatcgggtccgtggggtgcagcaaccaacgggcactcaggagatacgtccccaaagtgcctgcgggatatgctgcatgatgtcggtctatgacttgatgaatttcttctttctgtcttcttttcttttcttttc

SEQ ID NO: 4672 - DNA, 470 bp, Aspergillus oryzae
  modified_base (323)..(323): n is a, c, g, or t
  modified_base (396)..(396): n is a, c, g, or t
  modified_base (404)..(404): n is a, c, g, or t
  modified_base (410)..(410): n is a, c, g, or t
catttagcggaaaggctcgtgagaatgcctcgtttacctctttgaacgcaatctggaaagcacaaacagtctcgcgggttcctttaaactcgacaataagaagcagaaagagtagaccagctatttcggctgggtgcaaaccacatctgattaagcctttgggggcaggtgtccgggagcccaaatctgtaaacggcatgcaatacaatcctactgctttccgttgggaaggaaacgaaggcttgattcacgactttgaaataggttcaccccaatcaccaaagccagcacccgcccttatcaccaatgtaggcgcgatgcanaatgtgcaggtagttggtgggatggtgtttgatccacaacgtatgtgctggcttaaatttggcgccacttgcnaccagggnacaaangggctggtggcaatccaggatgacgatgatgtttttcgcccggtcttggtgacctgggaa

SEQ ID NO: 4673 - DNA, 476 bp, Aspergillus oryzae
  modified_base (339)..(339): n is a, c, g, or t
  modified_base (387)..(387): n is a, c, g, or t
gcggactatccgtgccttcttggatggtgaccagatgcaatcacctacgccagacacatcggtctcgcgtgagaagaagtatggtttgactcgcagagttattgcttgtctcgatgtccgcacgaacgactccggtgacctcgtcgtcacgaaaggcgatcaatatgatgtacgcgagaaggatggcgtgaattctggaggccaggtaaggaatctgggaaagccagtcgacatggctaaaaaatattacgagcaaggggcagacgaagtgacatttctgaacataacctcattcagaaactgtccagtggcagacacacctatgctggaaatattganaagggcatcccgaaacttgtgttcgtacctctcacgattgggggtggnatcaaggacaccattgatccagatggcacctgcatctcggcccttgacgtcgccaccatgtattcaaatctggggcggataaaatcagc

SEQ ID NO: 4674 - DNA, 299 bp, Aspergillus oryzae
gcctgaatgtcttctcgctcgtttatatgaccattgctacgttctttagcttctggccgccgaataatcatgctgatgtgcagtcgatgaattacagtgtggtggggacggtagggacgattattctgagtctagtgtattattttgttcgggctaggaggatttactcggggcctgtggtggagatatagcgttggttagtgggcgagtgcggatggatatgtgtccatggttggaaaaagaaatctgagttactggaggtagaaagttgaaattgcaaaaatctagcaaacgcccaa

SEQ ID NO: 4675 - DNA, 318 bp, Aspergillus oryzae
tcggcacgaggctcgtttctgaggtgcatatacttctgcttaatactgtccatcacgcctttcctgttctaacctgtgaagaagcatcaaacttgcttcccttcggttattgtactgcgcagtctggcccacctctccttgcaacgccgctggtctcgccgcaatctatctcaggtagctgcgaccgttcctcgacctgcctccagcattttataacgcaaacaaccatcggatacgaccatctgatagcactgagattttcttctgtcctattcttccccgcttggatggctccccgtcgtcgtaatatcggtgcta

SEQ ID NO: 4676 - DNA, 617 bp, Aspergillus oryzae
  modified_base (429)..(429): n is a, c, g, or t
  modified_base (510)..(510): n is a, c, g, or t
  modified_base (534)..(534): n is a, c, g, or t
cggcacgaggaaatcatgaaaggaacgaggagcatgcggacagttcaacgtttgtgcatcgattgggcctgaagcgacgaatgcatgcatttgaatcaatgccgcatttcagggccctggatgacacctacgatcactatttcaagttatatccaggcttaagcgtcaagaaagccaagctggatagcaggttatccaagttaagagagttgtacaagttggcgaaggttctttttgactatgtcactcctcaggagtatggaattactgataccgaaaagctggagatcgggttgttgacatctttaccattactccaagagatcgttagggatttggaagaagtccaagcctcgccagatgccaagtccttcttctatttcacaaaggaatctcacatatacaccctcctaaattgcatcctagaangcggtatccagacgaaaatcgctcggcgggctatccccgagttagattacctttctcaaatatgcttcgaactctatgaangctaaggattccgagtcatcaacnaattcttactcaattcgcatctcgatcagcctgggtgccatgccttttgatccccttgatgtgcagcttgattcaagactgca

SEQ ID NO: 4677 - DNA, 616 bp, Aspergillus oryzae
aggccaccatctcccccgaccagatccatggccgcgtgatagttataccacagaatatgcctctgctccccggttcagtgcgcttcaatcttaccccaaacagtgatatcgatggtgcaacgagccgccaacccgacgatatcatgatatccgccctcacagcagtgggtctatgggagaacatccaggaaaaaggcggccttgacatagtcgagagtgatctttccctgagctcaggccagcaacagctattcagtttcgcccgagctcttgttcagaagactctagtcgagactcggtacggcacacagactcacggtgggatcgtggtgctcgatgaagccaacagtaacgtcgacatggagacttctttgctcatgcagaatttgataaaggaggaattcgctggctgtgggatggactactcttgttgttacccaccgtcgtgagactatggattttgcggatgaagttatcgtccttgatgctgggtgtgttggcgatcctgtcaatggttaattgggatagtttgggccggtgaaatgagaacctggtgtatgggttgaaatccttttttgctaactcttcggcggtacctgggaatctcagcctcagc

SEQ ID NO: 4678 - DNA, 215 bp, Aspergillus oryzae
  modified_base (175)..(175): n is a, c, g, or t
  modified_base (201)..(201): n is a, c, g, or t
  modified_base (203)..(203): n is a, c, g, or t
atgacatgcagcttcgtatgttcactattttcgtgttcatgtttgttgccccgggtgtggtgaatcagctccagccactcttcattgaaagacgggatatatatgatgcgcgggaaaagaaatcaaggatgtactcctggaaagcattcgtcacggcccttattgtgtccgagtncccatatctatgtgtctgcggcgtgntntacttcctctgt

SEQ ID NO: 4679 - DNA, 601 bp, Aspergillus oryzae
  modified_base (532)..(532): n is a, c, g, or t
ggcctctccccgccgacgttcttttcccctcctcactcactttgcaaaacttcagaccacactggtttaggtgtcaacggcaattatcttaccactcttacctgaggaaagggccctttgttcatttctccttctttgtctgtctctcgcgtctccaatctatccatcccgtcctctgaaccccacttgaccagtaggcacgtcatggctaagcaagtcgagaacaataacaatgaccatttggtccaatctaccgacccagagcacccctccaacttgattcctgaactctgtcgcaaattctataactggggatgggtcactggtactggtggtggtacttccatccgacgcgatgaccacatcttcattgcgccttctggtgtgcagaaggaattaatgaagccgggagaacatcttcgttctccagttccccacccccaaatatcccccctccgagcgcaaatatatccgcaagccactcgacttgaagccatcggcttgcactcctttgttcctggcggcttttgancgtggtgctggctgctgtatccatactcactcccaatgggccgtcttggtgacgcttctagtggaacga

SEQ ID NO: 4680 - DNA, 283 bp, Aspergillus oryzae
  modified_base (155)..(155): n is a, c, g, or t
  modified_base (157)..(157): n is a, c, g, or t
  modified_base (172)..(172): n is a, c, g, or t
  modified_base (180)..(180): n is a, c, g, or t
  modified_base (203)..(203): n is a, c, g, or t
  modified_base (210)..(210): n is a, c, g, or t
gtaggtccaattatttgcggtgtggttatgggtcctctacactggagacaggcattgagtttcagatcgttcgggttgccgacggatgggagtctgtcatttcttttgactttttttttttcttctcccttttttttcacttctttgtgtttgcnanatttcttcaggaacnagtaaacnactgggactgcgggacagggganttctgcnctgatcttgcgtggcggctgatggaatatacagccatgtcttatgcacacactgttgggttggccccattgag

SEQ ID NO: 4681 - DNA, 605 bp, Aspergillus oryzae
  modified_base (515)..(515): n is a, c, g, or t
  modified_base (524)..(524): n is a, c, g, or t
tgaaaaatgccgagcctgcatattctgtgaacttcgaattcctgggttcgaataatgctctacttcgacttgaagcggaatttgctagaagccccggagcgcaggagtttgaagtaactcaacgccgatggcttaggcctcgcaaaagcggccagtcaagcgacagaaggccacccctccagattggtgtcattgatttcgaaagagccgactggcaacttgaaatcaaatccctggagttctacgagacatcttccatcgatgctgctttgaaatcattttcgcactctatcggtttccgacgctctacaaccataggtgacatttctgcaaagcctgagagaaaagtcgtctttccgagttcagctccggtatctaggtttgtggaaaagaccgccatccggtataggctaaaaagcaccaagtacatattagaaatagcaaggtacgatgaatacagccgattaaagacggatgcttctcaaggacaagcaccagcaccagctttagtgacnggtgagacngtgatgtcccatccacttcctggggagcatctatatttgattccactgggataacttgatgggagagcaagccaacctgtc

SEQ ID NO: 4682 - DNA, 413 bp, Aspergillus oryzae
tcggcacgaggccgaaacggcggatcgggagcgagaaccgctgctcaacgagcagtcaggagcggcggcctgagggtgggtcgcccaccaagcccttaacggagtaggtacacgacggtgccgtcaggagtcacttacatctgtaccccaaattgacctgtttagtttttctgtccgttctaaaccgggtggatgcaactggatctggacgatgcacggagtcttgagaccccactctttgttccacttgatttcaggtattctgtcatgtcttgcgctggaaattgatcgactccaaatgtttaatattgtaataattgaaggtggatatttgattggttacgtggatttcgcatgaagctgtgttatctatctactatatttatttagttgtggtcactgccgccgctaaa

SEQ ID NO: 4683 - DNA, 661 bp, Aspergillus oryzae
  modified_base (499)..(499): n is a, c, g, or t
  modified_base (608)..(608): n is a, c, g, or t
atcccccgctgcagggcttcctgcgacatcaagaggagattggcactcccgctcatcttattggcgtcgcggtcgactgtgtggatccatccgcttccaagctaaagatttactttcggagttcctcgaccagctttgcaagcgtcaaaaatacactgaccgcgggtggaagcgtatcgtcctgggacgatagtgccctggagcaactgcgggagctatggtctctcgtccttggtctccctgcggatttcccatgtagccaggagttaccgtcgaaatcacatgagacttcgggggtgctctataattttgatatcaagctgggcaatcaacagcctgaaaccaaggtatacattcctgtacgccattacggccaaagtgatcatgcgattgccgtgggtctggtggagtttctgcaacgtcgcggtgggacactccccgtaccatgatcgcttcctcaaggctttgggagcaatacgcctcgtttcgctcgttagancaggggtgtggagtcagacttacattgcctgtgcattcaagcgaggtcactcagcttaacttcttatctttcggcggaaatctaccacctgggtcctgggaaggtcaanggggcggaaacatctagaaattgcaattttctaacgtgagaatttacgtgata

SEQ ID NO: 4684 - DNA, 292 bp, Aspergillus oryzae
ccacatcggatgcttccagtagggcttgaaagctaatcggtctctcaaggtttaatgagttcacaagagtggctgaccagcggatattgtggaccacctatacgtcgatatgcaatctactaaacatgtcaacgacgtattccgcacgatagttctaagagctggtaaacttaacctcgcgggagatgggtggaccataactcatacttaagtgtttcgaacgcctccaatttaccagctctaaccctagcttaaatcaactagtgtaaatgaactacattaccatagcttc

SEQ ID NO: 4685 - DNA, 417 bp, Aspergillus oryzae
agttgattgctgaagaggctggatggaagcgtgagcagccccgtctgtaaacgcttcacgcttctttttgtccttaaccgagatacctcgctgtttgcgaaggcgagtatgtaggaaggggggttatatgagcggcattgaatttattcagatgtcgcacgattgatgacttatgtccacaacatcaaactgagaagacgaaagacgcaaaaaagaaggggttgggttctgcatcgccacatattgcactgttggcatgtagagatgtgcttaaatggataaggtaattgtattgcctatccatatcttgtatccctgtacttgttcctatggtttttgagcgatcccattgttagcccctgtatgtagcgccatcatactccaagataaaatatataaaagatttcaaactgagtg

SEQ ID NO: 4686 - DNA, 625 bp, Aspergillus oryzae
catttacacgtccgagccgctgaccggcgcacaacgggcattcctacacgcgactcttggggatgttaagatttgttcggtcatggggagttcagaggccggcccgtgggcgttgagtaatcctgatctcgtcggcgaggaaaacctcaacagcagttcgatggactttgtctttgatacccgcgatatgatcattgagattctctctcctgctggtttggatgatggaaagcctccctctgacattgaccctcttccgttaggagaaacggggatcattgtgcagacctcccttcgacgtctgcgtaatccactcgttcgctatatcaccggtgatcttggatccctccatccacttcctgaaatggccagcgccgtcgtcccagagagtgaacggcagtacttgcgtgtgcttcgtatgcaaggccgcgaccgtcgtttcagcttcaagtggtacggcgcatactttgaattcgagaaaatgaaagcctgctacaggcggaggaatgtggtatcctgcaatggcaggtaatcttgaccaactagaatcttcggggttaccaactctgcaagtcgcctgttacgggcttcatcccgagcaaacttctatcggaagaacaattgg

SEQ ID NO: 4687 - DNA, 390 bp, Aspergillus oryzae
  modified_base (45)..(46): n is a, c, g, or t
  modified_base (52)..(52): n is a, c, g, or t
  modified_base (72)..(72): n is a, c, g, or t
  modified_base (79)..(79): n is a, c, g, or t
  modified_base (189)..(189): n is a, c, g, or t
  modified_base (221)..(221): n is a, c, g, or t
  modified_base (261)..(261): n is a, c, g, or t
  modified_base (325)..(325): n is a, c, g, or t
ttcggcacgagattctttcctctcccccacctgccccatctagannaggagnttttccgttacccccctcgntttcctngaatctgattcttcctgcgactgaatcatctgacctccctctttgctgtgtgacatctttgggttgcgaaggactgtggttaccgggctattcagccgagataatatacnaaacaaaattcttacccactttttctctgtgntatcggacaacactagatataacaattctaggaccgaaanacccaaaccggacactcaaccacacgcccaggcggaaaacctagagagcgactactattgatanaattccattgcgccaactcctatcgtgacaccctctgcatctttattgcccaatcctggactcac

SEQ ID NO: 4688 - DNA, 625 bp, Aspergillus oryzae
  modified_base (575)..(575): n is a, c, g, or t
agggcacaatgtattggagctcaccccgaaggaaggtcttcttttacgcatgctttctggtctttgctactttcattgggaagtcgacagcctccctgggcgaccatcttcccgatttcaaagaatgtgttaagatctgtcaaactgagaactgtcaggatggaaattccgagatccctttccatctccgcttgatgtggtggacttgtcccgccgaatgcgactatacttgccaacatgttgtaacggaccgtcgagtcgctcgtgatcctccgatgctcaatccagtagtccagttccatgggaagtggcctttccgcaggatcatgggcatgcaggagccgttctcagttctcttctccctccttaacttttatgcccattggcacggcttatctcgaatccgcgaaaccatgtcgacgtggcatacttctctccggacttactatcttgcttttggatattgcggcctggcatgctgggacttcagtagcatcttccacgccagggacttttctttgacagagaaactggattattttggagcgggcgcaaatgtcatgtatggattatanctggcaattatcaggatattccgattagataaggaaaaacgcgaacgaaa

SEQ ID NO: 4689 - DNA, 256 bp, Aspergillus oryzae
aattcggcacgaggcaagatagaacgagctgcgtccggtggcctgctgtcggctttcagttcttcggaaggactggcgtgtaagtttgagggtcctggaactgtctacctgcaaacgagaaatgccgctgcctttgcggctcatctcagtggtaaatagtaatatgcgtcagttgggaaatatagcagagagttggcgcttcctttgactttctgtccgtgggtctggttttggttactttttttttttttttgtg

SEQ ID NO: 4690 - DNA, 622 bp, Aspergillus oryzae
aattcggcacgagggccagaccaacaacaacagagtacttcaagaagtagaggcgaaagtttcactgccccaggaatacctcttacatttatgtatagagataatcagctacctgttccaggagcaatagagtcgcaaatgagtgtcactccggctgtccgtctcccaccgttgaggacaccagtccatcagaattacccagcctgcgacatgatgaattctgggcacttactgccaagtaaaccatggtaaaaagcatttccctgataaggacagatctggtcagccacttctaggatggaaaatattaccacataatctggtataccggtgaagtgttctcacacagcttgcttttagagagtcacagcgaacttgcacaactcctttttcccgacatctatattagatggcacctcaagcacaagaagccaacaattcggcactgtgtgggatatctctaaagttccccgggcgcaatcgacgggaccaggagaagacgaacttgcacacttataatgtaataaacccaagcttaactcaaacgcgagcacatttctgggaatgacacatgttgggatctgactgtgttctggtggtacgaactaatttggaacatggc

SEQ ID NO: 4691 - DNA, 290 bp, Aspergillus oryzae
aacctgagcttactgaagaaaattgagagccttctctccgaacgattggccagtgatgtcaagatcggacatgatgagctgagctttttcgctggtggggtcgcgtatgcccttgaaaactggaaaccttatatggtccattgaaatgagttacgagcaacaaaaggcttcagtgcagggaaaatgaagccaacgtagtaaaaagtccggcacggaaacacgggaatttatttggtttgtctatagcgatttacaaaagctttatctagcgggttaatctattcagtttt

SEQ ID NO: 4692 - DNA, 356 bp, Aspergillus oryzae
aacgatgcccgtttgcgtgccggtaaaccgactctcggattcctgaaccccctcctgtatagcggggctctgaaggacttcaccgatatcacggccgggtcatccatcggatgtgacggcgtcaacccccaaactggtaagaatgttaccggaggtggcgtcattccctatgcccattggaatgcaactgctggatgggatcctgtgacgggcttgggcgtccctgactttatgaagttgaaggatttggtcctgtctttgtaataaaggccttgcttgttttgagagacggcttatgtatcgttactatgtaaaataggatctgccgtaaagagacaatacgaagatgtcatgtt

SEQ ID NO: 4693 - DNA, 607 bp, Aspergillus oryzae
tctttgatgataagccactttactggcaagcttgggatgttgaagttttccatctggagtcacggaaggagttgcactccagtagaaccagcatcgctgagaatgacccatatcgcgccagtgtcgtcactgaaaccaagattagtgagaatagctgggttaagacaacaatcagcctttctgctgctgccggggatgaaccatcatatgtagagtttgaaagtgaggttgagtggcaagaaaccatgaaattcctcaaggtagagttccctgtggacattacgaatacagaagcgtcctacgagacccaatatgggatcataaaacgcccaacacactacaacacgagctgggacatggccaaatttgaagtgtgctgccacaaatgggccgatctgtctgagaatggatatggcgtgtcggtcttgaatgactccaaatacggttttgcaacctgtggcaacctaatgcgtctatctctgctccgagcaccaaagcaccgggatgcgcatgcagatatgggccgtcatccatacgatatgcgatcctgcctcatgctggggctcttggatcacgcaccatccgagcagggttacaatttcaacca

SEQ ID NO: 4694 - DNA, 654 bp, Aspergillus oryzae
  modified_base (442)..(442): n is a, c, g, or t
  modified_base (554)..(554): n is a, c, g, or t
  modified_base (572)..(572): n is a, c, g, or t
ttcggcacgaggcgtacccctcagccaaagctactcataccatttctccgagcaacccgcccacgaagtcgccggtggatctgtgaaaattgtcgaccccgtcaccttccccatcgccacaaacttcgccgccgcaatcgtgaccgtgaaacccggcggcatgcgcgagatacactggcatccgaccagtgacgagtggacgtttttcatcaagggtaaggcccgcgcgacgctgttcacggcgcctacgacggcgactacgttcgattaccgcgcgggtgatgtgggctatttcccgcagtcgaatagtcattatattgagaatacgggagatgaggacttgatgttcttggaggttttgcagacggataagtttactgatattgccctcggtcaatggattgggtccactcccaagcagatcgtggctgatacgctgaanctccccgagagtgctttgagtaagctaaagacggagaaacagtacgttgttgccgggtcgaatgtgacgtctgttgcaaagaaatgatttctcggggactacggagagaacntcttctagaatgacgttncattttctcaaagagatgattacctcgataaagaatggatggatttcgatactggcgttgttttcagctgttgatacgttat

SEQ ID NO: 4695 - DNA, 524 bp, Aspergillus oryzae
tcggcacgagggaatagcctgcttgaccatgtgtattatatgtatcgttgagagcgccaatagagttgcacaagagcttggccttagtgcagcctttcctacactggtactggttccacttattggcaactccgcaagatatgcttcgattgtcatggtctcacgccaggggcatgtggaatcagcggtgcgggccatcatcaacagcatactgcgtatcactctcctcgtgactccctttctgatcatcctaggatgggttttgaacctgcccataacactgcaaatggacacgtttgacgcaaccatgttgtttttggctacaatggtgttgattcatgtgattcaggatgggaggagtaattacttcgagggactaatgcttgttgggatgtatatcatatctgctgctgctttctatatgcgtcctgggataaccggcgccacaaagcccatgccttaatcgagggtctatcatatacagcacgaacatgtaaagaggcattctgatgtatattgctcat

SEQ ID NO: 4696 - DNA, 524 bp, Aspergillus oryzae
gggttcagctggtaccctgtgcctctggagaacatgtccgaaaagggccagtggacctggcgtacctgggagatcgacctgccctgcgacgtggagggctggatcgagattgtctgccgttgctgggataactctctgaacacacagcccttggctgtccgtgccgcatggaactggggtctgcatgtcactagctccgcgcaccgaatctcagtctacagtatcaacaagagccggccattgactgcggagcgcttggagatgctcaaggctcatggacagcctcttgctcctatcacctggcctgaagagcttcagactcagtcctgggatgaatataaggacttcttcaagaagtacccgagagatcctgataatgaagcagtttgttaagtgcggtacgactaaaattggcaactgttttggcaacttctgcttatgactttgactacgatgcgttgtggggatggttaatagtgctttatggtatagttagcaagtatatgctaaattgatgaatatga

SEQ ID NO: 4697 - DNA, 594 bp, Aspergillus oryzae
ttcggcacgaggagtgcatccagcgctctactgaccttgacggcgacgagaagtgcaaggaggcccaaagccagtgtggctcgaagaatgcgtccgatgcctctggctcgtcttcatcgactactacggccacgtccttgcctacctcgactggttcttcgggatcgagcaagagcgaaagctcatccaccggcaccgcgacgagcagtggcagcacaagcagcactaccgctaatgtcgctgtgcgcatggcccaggaccatgcgacgggcatcttggcaacggtactcttcttgggtctccgtctcgttctgtaagatggttgcttctggtttcaccgcacgcacatagcttgatcgagttctgattatggaatgcgccactcctatccttctcgaaaaaaattgtgcttgatgttgtttctctcctatctcgctttgagtctatgacccaccgtatcgtactattcccctgtttttgcgtcgcggttaatgtgctgtatcgttctgtgcgtgctttcagtcgttcctttcacgagtctaattgatgatactctactccgtatatgggaagaataatagtcgttctttgagg

SEQ ID NO: 4698 - DNA, 488 bp, Aspergillus oryzae
attgcgatctcctcactgagatcatagacattcattattgctcttgctggcaactggccgccattcgtttaagggagcgtacccgctcctgttcactcattttgcagcaagtgtattctcggcgttggctccattgttctctatcagccactctatcaagaactgtcatctcttgacatacgcgactgatcatatcctttactggctggcatcttatcttgtgcatttttttttatcattcacgtgtaccaatattcaggtgattttgctgtatatttgtctagtctccaagagcacatgaaaagcgatcgagggtagtaccgacggtccggtgttattgtaccctattagtccgcctgtcgccccagtcgcactcccttgggcttcaggcgaccatgcattatcaccaccgacaccagactcaccagggacattcatatggttgttcgatcccccccacgccgcccgggatatagtacctcgtcatc

SEQ ID NO: 4699 - DNA, 500 bp, Aspergillus oryzae
ggtgctgcaccctcagatggagaaagcggtccctcaccccaggagaatgtgagcgatcagacgaagcagctgcgcgcacaattggcagctctcgaagctgaagccaagaccctcggaatcgatcccaatggcgctgattctggtgcgccctcgtatcgcggtcgtggtcgtggatatctgggacgaggcggttatgcgccccgaggccgtggatacgatcccaatcatcgtggaggatatcgcggtcgtggaggaatgacccgtggccgaggaggtgtgcttcgtctggataatcgacccaggagagttgccgtctcgggcgttgagttgaactctgagaaggacgaagctttgagacagttcctcatcggtgttggtgaatatgagtctattcaacctaatccggagcaatcggactctgtgatagtcgcattcaaagagcggtacattgcagagagattcatgtttgggaccatgggcagataccatctgtcggcgaa

SEQ ID NO: 4700 - DNA, 217 bp, Aspergillus oryzae
aaagtgagagatcggcggccagagaaccttgaaaataatcgaccccagccttattaggtttggtcacgtcgccgtcccttcatcagtcgctcttatgtatggtctggcctccgcttgttttgttagatgttattcaggacacctgtatctgtaccctagatatttttctcctttgaaaatcttgtttgaagacccaatgtcactatttcctttgtct

SEQ ID NO: 4701 - DNA, 544 bp, Aspergillus oryzae
ccgaccggaccttgatcctgttcttcgcaacgtttccttcactgtgcagccgggtgaaaaggtcggcatcgtgggccgcactggcgcgggcaaaagctcactggcccttgctctcttccgtggccttgaagctgagaagggacgtatagtcattgatgatgtagatatcggctctattgggctccgcgacctgcgagagtctatcacgattgtgcctcaagacccgactcttttcacaggcaccatccggagcaacctcgacccattcaatctcttcacggatgagcaaatattcaccgcgctccgtcgggttcacttgatcggctctggaacatcaggaactgcaactcctgtggtaaacagcgcggaaccgtcgcgacagcgaatggcactgtcgttcttgaaaataagaacatcttcctcaaccttgagacaccgatttcggagtctgggatctaatttgtcccaagggacagaggcagcttatgtgtctcgcccgtgcgcttcttaagggaccccaaagtactgatgatgggatgaagcg

SEQ ID NO: 4702 - DNA, 329 bp, Aspergillus oryzae
attcggcacgaggcatcggccccttggcacatggacttaaataccaccggcggcaccgtctccccggttgtcgtcacgccaaactacacctattatatccggcagggcgacgatattgttaatcacttccgtctagcaaacgcctacacctgggaaggaggacgaggtctaagatgtctattttggcgcgccgttgcagaccggattccgctgtaactccggaagctcaataaattccgcctgaggcgatccaggtgggactaaaaccagcctggtatagattttctccctagacccttagaattaataatgcaaccctgaacgatgtt

SEQ ID NO: 4703 - DNA, 544 bp, Aspergillus oryzae
ttggtcattccctccttgaagtctgccgccacgagaaatcctcgtctcttccattttctgtcgctttccgggctactagcgtataaggtgcaagaccctgccaaccgactttttatgaccactttcgcggtcgcttgcagctgtatcgcatggtctgcaacactatatgcagaaagggcaaacagctctaggctggagtcccgtatctttgcatggggcattggcttgattatgtcgagtattgctaagtttgcctgcaaaaccaacaaccccatctggcctatcatgcatgcagagaatggaggatggaataaagtggggcttttccttggtgtcctagccgtcctcaggtcgcacagaaggcctccgacgaatggaggggactacttcccctcgagcggcaggaaaggctcttcgttatttgccgcctttggtatcggtgggtctgcttttcgcaatgcactccctcctctccgactccaagtaccatgatcgcttgggtctgggagggatatcccgtgcgcggccctattgcagtacctca

SEQ ID NO: 4704 - DNA, 536 bp, Aspergillus oryzae
cgaaggaaggaggtgaaagcggcactggaccgtttacaggtcaagccggacgatcttaaggagaaggcggagcttggaaagaaatggcccaatgtcttgacctggatcgagtccaactgcgccaaaaaccgcacggccgaggcactctatacccaggtctacattggcctacgccgctggaccctgatcaatgagatgctgcttgaaccacacaacaaggccaactgtattgccatgcttaacactctattcccacccgttacggatgcaaccgtcaaccctacgccacagttgactgctaagattctcaagtctcaacgagatggattcttccggtacattgcagccttcgataagcccaatgggaaaagatatcctccagaaggtcatcacgcagggcgcacctgagggagaggagacgggatggccgctggtgcgagacgccttggatcggtaccttcggcttaccaacgaaaatcatcgatgaactggtgccatggtcaatggatcagagtagtctccgaggttgactgtag

SEQ ID NO: 4705 - DNA, 547 bp, Aspergillus oryzae
acgtttcagtcacccagcactctgcctagtgtcatcatgcgaacagccccgaatgtgattatcacaggaacccctggcgttgggaaaactgtccactgcgaacaactagcgcaagataccggtctgcgacatctgtcaatcaatcaggtcgcaaaagatcgtgattgcttcgagacctatgacgaggagttgaaaacttggattgtggatgaggataaggtacgctgagtatatacgctctctcctccctggaagtctcaattgaataggatttctctcagattgcaggttaattttccctctacttacctggtctggtcaatatagctgctgggacgctgttgaagatgagatgcttcaggggggactcttgattgactggcatgcatgtgatctattccccaaatcttggattgacctcgttgtggttttgcgatgcccgtctacatctcttctatatgaccgtctttcatcaaggggatataagggacgcgaagctacaagaaaatttagacgcagaagattttcggtgtctattgggaagaaa

SEQ ID NO: 4706 - DNA, 366 bp, Aspergillus oryzae
agaaactaatccacataatctgcatatcttcccactgatgcgcatcttatccgagcctctttccggaccctacccgttaataccgcttcgtcacggaaaatccgacaccctgactccgctgtcccactgtcttcggtccctagactgcatccacgaatgtcctccagcacccaactcttgatagtcgctcatgcgccgcttctaattgtgaatggcaggcttgggaattgatcttgtgtggtgaatcagctccttcacacctgtcggtggctagtgaagtcagtggcgtgtgtagcccaggcggaaatgatatttcctgggtaatgtctacactgttgccttaaactgtgtccctgggagttacta

SEQ ID NO: 4707 - DNA, 514 bp, Aspergillus oryzae
  modified_base (167)..(167): n is a, c, g, or t
  modified_base (345)..(345): n is a, c, g, or t
  modified_base (347)..(347): n is a, c, g, or t
  modified_base (414)..(414): n is a, c, g, or t
  modified_base (420)..(420): n is a, c, g, or t
  modified_base (431)..(431): n is a, c, g, or t
  modified_base (482)..(482): n is a, c, g, or t
cactggcttcgcgttacctaactgctcgtcgacttcccgactctgcagttgatcttatcgatgaagctgctgccgctgttagagtgacacgtgagtccgagcctgaggccttggataacttggagagaaagctccgacagctgcaaatcgagatccatgccctcgancgcgagaaagatgacgcatctagagctcgcttggaggcagccaagcaggaggcagccaatgttactgaggagctgcgcccgctgcgtgagaagtacgaaagcgagaagcagcgcagcaaggccattcaggatgccaagatcaagctcgactccctcaaggttaagagagatgaggcanancggtccggggatacagtgaccgccgctgactttggaatactatgccattccggaaaccaaagctctngatccnaaagactcgangtggatcgccgcgaaaagccggatgaagaacgacgttgctcgctcccgganacctgggagagacactgcttcgctgacgctgt

SEQ ID NO: 4708 - DNA, 416 bp, Aspergillus oryzae
ttacagaccgttggacggcacatacttcgcggatcacttccattgcatggaatgaaaatggtacacacgttgtgagcggagcattggacaccaatatattcgtgtggaacttggccaatcccggagaatggctccaagctactaatgctcacaaagaaggtgttaacggtgtagcttgggtgtcggggtcgaagattgcttcggctgggtgcagatgcagcagtcaagttgtggaaagtagaaggtttggaatagagtaaagtgaaatggactttgggggcagcagcgatcatagtatacgtatcgatgagtgaaaggtcatatctgcgcagcctcttccttatttcactatcttttctctcgaatcttggaattgtacatacatacaacgaagttactctattacagttcttagg

SEQ ID NO: 4709 - DNA, 548 bp, Aspergillus oryzae
  modified_base (357)..(357): n is a, c, g, or t
  modified_base (398)..(398): n is a, c, g, or t
  modified_base (435)..(435): n is a, c, g, or t
gacagaccccagcagtgacccaggacataatacgagtattacaaatactccaaaccaaacatgaccctcaaatacctcatcacgggcgcaacaggcggcctaggacgatacgtcctagactacttcgtggccaacaaaccactgcacgaattcgctgccgcatcgtcgagagagtcaaaccgaacgcaatttgaggattgtggcattgctttccgacaggttgattatgatgatcctgctacgctggataaggcattccgggatgtcgagaatctactttttgttagtactaatacgttcgataatgagaagcgtcgaaagcagcatcagaattttgttgatgcggcgagtaggaanggtgtgaagcatgtgtggtatacatctctcgcttttgggangattcaagtccgattcccaggcccgcggttgcagacngcgcatttagaaactgaagaattgcttaggaaatccggagtacttacacttccatccgagaaggaatttacacagaagccttcccagttctcctcaactggtatcccgattca

SEQ ID NO: 4710 - DNA, 486 bp, Aspergillus oryzae
  modified_base (1)..(1): n is a, c, g, or t
  modified_base (125)..(125): n is a, c, g, or t
  modified_base (264)..(264): n is a, c, g, or t
  modified_base (276)..(276): n is a, c, g, or t
naggctactttcaacactatcgagcttctcagctgaagattaacagtcaattccaccttttaatcactgtcatcatgttcgctgcccgccgtctcaccgctggtgttccccgcgtcttctcccanagggctttgttccacaacactgctcctgctttcgtccaaaagggcgactccattcccaaccttgatgttctggttgaggactctcccggcaacaaggtcaacctcgccagcgagctgaaaggcaagggcgtcattgtcngcgttcccgcanctttcagccctgcctgctccagctcccacgtccccggatatatcaaccaccccaaactcaaggaagccggtcaggtcttcgttgtctcggtcaatgatcctttcgttcatgaaggcgtgggccactctctcgacccctccggcaagagcggtatccgcttcctgggcgacccaccggcaagttctccgaggcgctcgaatgtcaccttcg

SEQ ID NO: 4711 - DNA, 435 bp, Aspergillus oryzae
  modified_base (52)..(52): n is a, c, g, or t
  modified_base (251)..(251): n is a, c, g, or t
  modified_base (354)..(354): n is a, c, g, or t
  modified_base (369)..(369): n is a, c, g, or t
  modified_base (372)..(372): n is a, c, g, or t
cccaggacttggcggtggggtgttggatggctgtgagcaagatatctagganacggatggtgccagtggatgtagatactgctgggatttggtcgatggggacgagcttgtcgattatgcgttgggtgtcctctgactgggggagcgaggcgacggactgctgttgactggagaggtcgtctgaagttgtggaggggaatgaggcggtggacatgctcattggcgtgaggacgttcgatgcggcgccgatngctccgccggggtggaaactcttgaagatctctgctgggcctcttcctggagatgtgtgtagtcgtctggcggtggcgatagccagggcatctcccagtgacngggctaccgtcgtanacnaggttggggcgcatacgccgatggataactcctcgtcctcgtgaatgggtgctggtaggagga

SEQ ID NO: 4712 - DNA, 441 bp, Aspergillus oryzae
gccacggaatcagtgccggcgctggcaagctcggctcgattctcgttcaaatattctcggcacacttcaacttcggttcgggtctcggaaatgagcccatcatccgccacggctgggttctaattgtcttcagcgtatgtatgatgctcggtgcggtggtgacacatttctggatcccccctgtgaagcgacaggacggccaagggaagttctggggtgggaagacggagaccttggagacattggcactgggaaggatgggatggaagagtcggtatgctgtgaaactgagagaaagagagagagttatatcaccgaccttgtcgccgggagggtttggcttatagtatatagttttatgaatattgcattgtggatatggtgttttgctgggtcagacactcaacttgatctttcttgtacatacacatttagacatat

SEQ ID NO: 4713 - DNA, 242 bp, Aspergillus oryzae
  modified_base (3)..(3): n is a, c, g, or t
  modified_base (31)..(31): n is a, c, g, or t
  modified_base (58)..(58): n is a, c, g, or t
  modified_base (134)..(134): n is a, c, g, or t
  modified_base (147)..(147): n is a, c, g, or t
  modified_base (161)..(161): n is a, c, g, or t
  modified_base (166)..(166): n is a, c, g, or t
  modified_base (189)..(189): n is a, c, g, or t
acnagggactgtcaggcgcaatgcgagaaanatcgcgaatgccaccagtactcttacnagaccgggaagtgcctcacctccaaggtagccaggcgagggagtagcaaagccggtataggctccggttggatgcncgaaagaatcaanaaaacaatggaaancctcngtcattgccgaaatgtaaggtgnatcactccaaagtcatgatgttctcggtcgagcatttgattgctttcctattc

SEQ ID NO: 4714 - DNA, 546 bp, Aspergillus oryzae
ctggaaaattcgtggaagccacggagtttctatgagcaaactacacaaaatgatgctctgagccctatcatcgacttggatgcggctctgggaccttttaatacccctgatgggcgatcccgctgtacccctgagagcgggttctcagcagcgacaaaacggatgtatagtggtggacgacggggcgaatttgtcgggccagaaatgcgctatcaccgacgcgcagaaagtgccccggaaatgcctccttttgaccgtagcttcctcaaccaagcgcgtctcgcgaataatgcgtccttggaaaatccggatgtgttctacgaagaagaggaagacgcttttctggcggccacaagtgattcacccaagcacagcgatgaaattattgcggcacaggctgtttcctccggtgctgaaagtgtcgacctccaatcagagggcagcaaagttagctcagacaccctcactcgggaacacacgagcgaagtcaatacacagcagtcgggtctcggtattcagaaagacgggctgcctgacccgttcaga

SEQ ID NO: 4715 - DNA, 435 bp, Aspergillus oryzae
tattccatctgcaccgtcgtacagtctagaccaaatatgagtaaggtcttcgcctatgtctaacttgttcttcttttcttttctttcttttctttcccctctcgatctctttgtcccccgagccaatatagttgccacccacatattacttagatgaagtaagtgtacgaatgaggcggctccgggttttctgagtctgagataagttggttttgtgatcagacaaccttgtctgcagagacatggtacccacttagccatctggaactgggttgagtctgaggtagtcatggtcttttatccacatgtacatgcaccgtatcgagtgtagtgtgtctggggctcgtggctcatgtccaaacaagtggcgtaacatttcagagcaaagctgcatatgtgtttgttcgatgccatcaacaggaaaattgacaacgc

SEQ ID NO: 4716 - DNA, 648 bp, Aspergillus oryzae
  modified_base (536)..(536): n is a, c, g, or t
  modified_base (560)..(560): n is a, c, g, or t
  modified_base (576)..(576): n is a, c, g, or t
ggcagcacatccaaaatggcggagaaagaagttcccctcacggccgtcaaggtcgatgccttggtggtcatgaagatcatcaagcactcttctcagtctttcccgacgactgcgaccggttcgatcgtcggcatggacgtggacggtaccctggagatcacgaactctttcccattcccggtcgttgagatgcccgccgactcgcacttcgacaacgccgcccctaacccggctgctgctgcccctcgtgcgaaggccaacgtggcttaccaggctgagatgatccgcatgcttcgggaggtcaacgtcgatgcgaacaacgtcggttggtacaccagcgcgaacatgggtaacttcgtcaacatgaacgttgatcgagaaccagttcttttaccagaaggagatgaacgagcggacagttgctcttgtgcacgatgtcagccgcagtgcccagggaagccttagctgcgggccttccgcctttcttctaagttcatgactgctttcaaggaaaacaagttcacctctgaggagcntcaaaagtctctctgaaacaccangaaatctttcgttgancttccagttgaaattcacaactctcatttgatcacaattttcatccaccaactccattgccccaaccagttc

SEQ ID NO: 4717 - DNA, 579 bp, Aspergillus oryzae
ggcgattggcgccaaggttgcttgcccagatgcccttgtcgttgatattgatggagatgcctccttcaacatgaccctcaccgagctctctactgctgctcagttcaacatcggcgtcaaggtcctcctgctgaacaacgaggagcaaggtatggtgacccaatggcagaacctcttctacgaggaccgttattcgcacactcaccagaagaaccccgactttgttcctctggccaagtccatgggcgttgctgctgataagctggtcaaccctgctgagatggaggagaagctgaagtggctgatcgagagcgacggccccgctctgctggaggtcattactgaccgtaaggtgcctgtgcttcccatggtgcccgctggcagcgccctgcacgagttccttgtttatgacgaagccaaggaacaggagcggaaggccctgatgaggaagcggaaggtcatcgtctaagttgacatgaatggtgcaacgacttgaccaaccgatcctgtaattgcaagtgccattgattttattcaatctgtcgatatccacggcgttttctggcgggttctaaaaac

SEQ ID NO: 4718 - DNA, 703 bp, Aspergillus oryzae
  modified_base (6)..(6): n is a, c, g, or t
  modified_base (17)..(17): n is a, c, g, or t
  modified_base (34)..(34): n is a, c, g, or t
  modified_base (647)..(647): n is a, c, g, or t
tttaangacgggagtgnatgtaatacgactcagnatagggcgaattggagctccaccgcggtggcggccgctctagaactagtggatcccccgggctgcaggaattcggcacgaggctccattcttttcatctactcttttgaatgggcattgaaacgtctccacccgatgtcgaagaatcgacggagcctcctatatgtccttatccgaaggaatctaagtcgcacctaaataatcatcccagcgatgtaaaatcggatctcgagactgaacacgggacaccggagcacagtccgacttcattcgaatccgcgtccaacacctccactcgccaacaggattttcgtagttcgttacaatatgctcacactatcgacccagagcacttggctgtcattcttgatgttgatgttcgccatggcctttccagtgccgactcggcaactcgcctacagcgagatggacctaacagggtccgagaaatggagggtttatccgtatggaaaatattgctgaggcaagtttccaacagtttgacattagtgcttttgatcaccatggcaatatcctttggtatcgatgactacattgaaggaggagtaataaacgcagtcatcctcctttaatattgttgtcggattcgtacnagactaccgcgcagaaaagacaatcatgttctctgcaaaggctatctgcaccagta

SEQ ID NO: 4719 - DNA, 589 bp, Aspergillus oryzae
  modified_base (504)..(504): n is a, c, g, or t
cgaggcaacggcgaccaatacacaagcatcatccggtgggacctagacgacccgctcaccaccgtcaaccagacatacggcatgggcatggagatcacggggtatggcacgcgccggaacttcacgcagccatttgcagccgaggacatcgtcatgctgtatgacggctactgcgcttcgacttgtactctcttctccgagttcatgcgtctccagggcggcgtcaagagcattgctatcggcggtcggccgtcctcggacccgatgcagggaatcggcggtatcaagggatccaacaatttcgccttctcctacatttactctctcgcgcaactggccatcgattccgctcaacccggtcaggaacataaagctaactggacggcgctcacggaactaagcgagttgcccacaaccgctcgaacggatacctccatcaacgtgcgcgacaatatcctcccggagaactggacgacgggcttccatctcagtttgtcttacganaaggccgattgccgtctcttctatgagccgagatgatcgtagatgttactgcgatgtgggaggctgctgccgatgctgcttgggt

SEQ ID NO: 4720 - DNA, 490 bp, Aspergillus oryzae
ttgagggaacgaaccgcgttttggtcagcaacggcgactatgacatgatcatcctcaccaatggaaccctgctggctatccagaatatgacctggaacgggcagctcggattccagtctgcgcctgctacgcctatcaccattgatctgcctgatctagcgtggggcgaggtgtttgaggaaaatggacaagagatgttgcagagccagggcgtcatgggtgtgcagcattatgagcgtgggcttatgtgggcggagacctaccaatctggacatatgcagccgcagtaccagccgcgggtgtcgtatcgtcatttgcaatggcttttgggtcgggtcgataagctttaagagtcctagagagggatccatgatgtatgtaagatgggaatgagtagacggtgtttgacgaaatacaaccctcaaatggcagccaagggggaagacgatatgtacatatagttaaataggtagcaaaatactgtcacagc

SEQ ID NO: 4721 - DNA, 401 bp, Aspergillus oryzae
tacttcggacgggattaatcctccggatggccgtccaagtacgtctttgactgttccaagaccggtctggatctcttcttctctctctgttttatactttctgtcttgaaatttcccgatatcacccatgggatggcgttggctgggatagcactacggatggatgacgatctctgagtaatttgtataaagaatgaatcttattcggacgacgatgagcgtggttgggttgtaaattgaactagttagccgagtccaaagacaatatgacgccattgcacatggtattggatcatcgagagcttagaatgcatcatatcggaggcatcgaccttcccgctgcagcatcatgaagcaaaaaaggttagtagcatagacgtcaatttcgatacatttatagt

SEQ ID NO: 4722 - DNA, 393 bp, Aspergillus oryzae
cggcacgagggagcagatgggttttcggttttcggggtggtaagaggctccgcatccattgttttgtaccctggttttctgggggagcctgcggctcggtatgagcccaagctcgacaacactgaattactggctgtaccgggtcaaaccttcgtggaaatcagacccactggtgatgttctgatggtttggtggggattctccagagagctcatcctggctaaagctgcctcgccttttgttttgccttttatggtttttgatccgcgggggagaagctaagatcaccggacttggatgcgtgtcctattggcttataaacatatcgttagctgagatgatcatgagttatgcttaccagcagtcagaaagggaactcacagtcctattact

SEQ ID NO: 4723 - DNA, 571 bp, Aspergillus oryzae
tcggcacgaggccacaatggttgcagaaactaagctgtacgattccttgggtatcaaacccgaagcatcccaggacgaaataaaaaaagcataccggaagtgtgcattgaaatatcatccggataagaacaaggataatccgaccgcatcggagaagttcaaaggtaggtgacttaaccgtggttccccctcccgtgctccccaacacggtcatttcctaccatagttttggataatagctaacactttcacagaggtatcgcaagcctacgaagttctgtccgatcccgaaaagcgcaagatatatgaccaattcggcctcgactatctaatgcggggcggtccagcccctcctccgcctgggtagtggcgctggcggtgctggtggaagtccgtttgatggtggaatgccaggcggcttttcattcggaggcatgcctggaggaagtggtgctcggaccttccgtttttcgactggccccggcggtggcagtggcttccagttcagctccgcagatgatatcttccgaaacttcgctaaaggtgggggttggtggcatgggatcacgac

SEQ ID NO: 4724 - DNA, 444 bp, Aspergillus oryzae
gctggcagtagctctgtatgattcgtcgtatccagttggactgtctggtacgtgggaattggtacatcgagcgcatctgagaaaccagtaaagttcttggttcgcacaacagatatctccaatctagcatattccgcggaggaattggacgcgtgcgttctcagcaggtcaagatccacatggcaagcgctgctgttactgaagtatgacgggggctgagcattgggaatagggctaatatcaatatgatgccgtgaattgaaaaggaatactgcgaaaatgagtaagagtgaagcggcgacagctgtcacggcagtggattggcgccattgaaaagggtaatagcgcgcctgcatggcgacccgaacatagctaatatctcattaatcgtcgttctatatgattggacaccaaagttgaatcatttattgaagggctatattt

SEQ ID NO: 4725 - DNA, 504 bp, Aspergillus oryzae
ggctgctgcaactgcacttctagatgaggagcatccgccactcgatcaagaccctggagacatgaatgcgtacacacttggtcggattggtcggcataatatcgttatcggatgtctccccttgggcaccattggggaaagccctgccacagcagttgccaaggatatgcttcggagctttcctaacattaaaatcggtttcatggtgggaatcggagggggtgcccctgggcccgcaagcgagaaccccgaagatgatattaaacttggggatattgtcgtgagcaaaccggggcccggccatggtggagttatccagtatgattacgggaagaccctctccgaaggcgagtttgtggacattgggctatttgaatcgccctcccaatgttctcttgacggcacttacaaagcttatatcgcgaaatgaactcgaaagctcgtcgctaccacggcaggtagctgacatgggaaagaatacccaagaaaataccaggaatggaa

SEQ ID NO: 4726 - DNA, 699 bp, Aspergillus oryzae
  modified_base (459)..(459): n is a, c, g, or t
  modified_base (555)..(555): n is a, c, g, or t
  modified_base (569)..(569): n is a, c, g, or t
ccagtgcctaagtgccggcggaacaaagccccgactcgagaacggtggacaagggatatggacaatcacttatggaatacgtatcagatttacctccaggatcctacaatcacccccttcaaaatgacaccgggaagcattccgccattgggggtcactcaccgagtagcgcgagaggcaaagaagacatgggaaagaatgcgttgcagatttacaaaacagctcccttccgcatcgcaacaatttgcgagcggtaactcaacaccaactccaaagactgacaccccaaagaatgtatggcccagatcggaggcgtcgaccaggaggagattaaaatatttgtgcaagaggaaattctgtatcgcgcctcattaccaaagactgatgatgtcccgaagcccgacacctgccttggacatgatttctcactcgtcgcgagaatcgtctcaagcagaggtncccacaagtagctcgggcagtttacgccacacgcgatctgggcatatctcttgtctctagctcagttcctgggccctaacacagttggcaatggangaaccaccgagtantaacagtggcgaatggttcagtcagcccgtaccgtgtaacgctcccatggcgcggtcgaccatttgcaaatagaccgtttacttttgatgagcgggagatggcacccgactggggctctccgtttactat

SEQ ID NO: 4727 - DNA, 504 bp, Aspergillus oryzae
  modified_base (426)..(426): n is a, c, g, or t
atcctcatccatctatcctaagtctgttttcccttctggagcaggtctttttcttttttcttttgaacctcaccctcccatcgtcccgtttctttctctcttgatttaacgatcttacgttgctgtaccttgtgagtcttgtccccacctccactggagtgaggagagctgctgccaaagctgagagttattctaaactcttctggcctcgccgcgagtttcacgtagatagtgaatctttaaggggcctgtatccgatttgtttgcagtagacctatgactaacacaacattgacgtggaatagaatataactcacatccctcatcatgtccgagacttttgagttccaggctgagatctctcagctcctttctcttatcatcaacactgtctactccaacaaggagattttcctgcgttgaacntatctccaatgcctccgatgcccttgacaagatccgctatgagtctttgtcggacccttccaagctcgactcaggcaa

SEQ ID NO: 4728 - DNA, 584 bp, Aspergillus oryzae
  modified_base (403)..(403): n is a, c, g, or t
atttagatcaacacggagtctgtccccatcttgaagaagggctagattaccacccgccgctgcctcgggactagcattgaggattgatggtgagccggaagttcccgattgtcgcccgtctccaatgcacggaagcgatttgaccccttgtcgtaaaagccgtccaggtgggtgcatgttgacgacctcggcggcacctggatatcccaatgggccagcaccgcgcatcaccaggatacttctgtcgtcgatgggggtggaagggtcctcaagtcggtgatgataatcctccggtccatcaaatactacaaccgtaccttcaaatgcattcgggtccttgggattctccaagaacttttgtcggaaaggctccgatatcacacatgtcttcatgatagcagancggaacagactgccttgaagatggagaaaaccggcatcttccagaagtggctcattgtacggcttgatcattcgacggtcccagcttcctagcatctagcagctccgccataatcgcgggtagcccgcccgcccgatagtattcctctccaacagttcacggctggttgcatgtttagcaa

SEQ ID NO: 4729 - DNA, 646 bp, Aspergillus oryzae
  modified_base (603)..(603): n is a, c, g, or t
  modified_base (619)..(619): n is a, c, g, or t
ctcgtgccgaattcggcacgaggcaagcttccttccgtcggtcctcatcaccggatgtagtgcaggtggaatcggctccgcattggccgaaacattccacgaacgcggactacatgttttcgcgacggcgcgatcgacatctaagatggcccacctggagaaactacccaacattactctcctggaactagacgtgaccgacccaaagagcattgaatctgccgttgaggtcgtgaccgccaagacaggcggcaaattgaactatttgatcaacaactcaggtcagagtctcgtcctgccagccttggatacgagcattgaagatgccaagagattgttcgatgtcaatttgtggggcgtggttgctgtcacgcaagccttctcgcccttgatcctcgcaaccaaaggaacaatcgtcaatgtggcatctcttgctgccttcttccgttccccttggttgagttcgtctctgctttattcgcattcttggatttgatcttgctgatgcggataggtttctataacgcttccaaggcagccgtggatgcttacacacacactatccgccaggaattggcccctttggcgttaaaattcttcacntgtaactgcggggacngtacaaactaatatcttcaggcctgta

SEQ ID NO: 4730 - DNA, 671 bp, Aspergillus oryzae
  modified_base (344)..(344): n is a, c, g, or t
  modified_base (491)..(491): n is a, c, g, or t
ttcctgacattcgttatatcccatcgctttttcttcactagtcccaatacaaccaatcttcctattctatactacgatgaagctttcgtgggcagtgggagcggccctgttgggcaccgctgtggccgatgttgaccctatcgtcatcaagggttccaaattcttctactcgagtaacaatacccaattctacattcgtggtgttgcctatcaacaggactactccagcaacggtaccaccaatggcactagcagctacaaggaccccttggccgatgctacagcttgcaagcgtgacgtgcccatcatgcaggaactgaacactaacacaattcgggtctacnccatcgacccgacttccgaccataccgagtgcatgcagttgctggccgatgcaggtatctacgtggtctcggatctctctgatcccacccagtccatcgaccggagcgatcctacttgggaaactactctttactctcgctacacanccgtcattgatgagctggctcagtataataacaccttgggtttctttgcgggtaacgaagtctccaacacagtcgccacgaacgatgctagcccgtttgtcaaggcactgtccgtgacatggaaatcctacatcaagcagaaaggctaccgcaccatgggtgttgggatatgccactaac

SEQ ID NO: 4731 - DNA, 571 bp, Aspergillus oryzae
  modified_base (525)..(525): n is a, c, g, or t
cacgaggtgaatgggaacatagccttgtcgatggagatcggttcagcctacgccttgcaggtttgccttctccagattccagccctggtactgttcagcgctatttatgaacgcttgattgatcccgcagaacttctaactcacaccttcaaccttattttcccgcaatgggacatggtttcagtaatactttgtgtctttctcctatcctatgtctacggtgaagggaagagcaactacttcaaaggatctatccttgtcctcacatatcttgtcgttgtgattggtttttacttgtctggctacagcaacatggacgtcatgggtgtcgatcgcctcgacacattggcgcttggcacctcccaaacatttcacactctcggtaggtcaaagagtggcatggcctattgattgcaaatccggcaagtgaatagagcgcggtttcgcagggctctaagggttgcagatatccgtttcattgaaccttggcgcttgaattttgtaaagcatttaccttcaacgtanatgttctgcgttcatagaaaaccaggaattaatactaaagatttcc

SEQ ID NO: 4732 - DNA, 616 bp, Aspergillus oryzae
  modified_base (610)..(610): n is a, c, g, or t
attcggcacgaggcactcttctaatcttagctcttctgcgtcatttcgtggcgactgcttattgatttagactcttcatccttttgactcaatcgctgccagtagcttccctcactcggagcaaactcggcattgaaactatgtccaaagtgacctgtcagaagagggaggtctttctcgcttctgtagctttgagtgttaaatcctcaactcgtctcgccacgtcagagtccagtctagacccgtatgctccttgaggtaaaggtattcgaattcttgtgtgcatttgctttcacttcttccgggtctgagcaatcatgccatggacatgcgggaattctgttgttcctgtggtttccgatacatcgcatgtggctaccagatgacgttgggtcggggagctcgaatttcgggggtgacttaatgttgagagacatatcgctaggatatttcgccatatccatgtctttaccgtttggaagtgtttgtcgtcgatggccaaacaatacaatgagtggtgaacaagtcatggtataattcccgcttatgatcagcactcttcttcactttgtcatgttagactagttagggatcgggactgcataagganttatac

SEQ ID NO: 4733 - DNA, 205 bp, Aspergillus oryzae
cacgagggagagatcagggcacgtcgcctgagggatgtactattggaggattgatggtcatggaggaggctggggtgcgcggtcatgttgggagagccttacgagaagccgtaaccattgcgcgccttatggacggtacccgtcatttgaacgatactagacagtaggaaatttatagaagtaatgaaactcgattatcattttt

SEQ ID NO: 4734 - DNA, 432 bp, Aspergillus oryzae
  modified_base (7)..(7): n is a, c, g, or t
  modified_base (68)..(68): n is a, c, g, or t
  modified_base (378)..(378): n is a, c, g, or t
  modified_base (381)..(381): n is a, c, g, or t
  modified_base (405)..(405): n is a, c, g, or t
gtgacangacgcccatttttccctgctaccaaggtcctatcaccgaccctgcacttttgttagtaatnaacagatgcgattgtacagattaatatcggcatgtccattttgtaaggttcttgtcttaaatgttgcacatacagtgtcgttcaagccaaaagggggtacgcctaccgcattattgtcaggcaggtgtatttcaaggcagctagtggtgtccctcagagtagtcccacggggtcacatagcagtcaaagcattacgagtacaagccggccgcagccaggcttgaacgcatcaagcatctaatgccctcccacgctactgtggcacagctttccagtatatatgcccgagcataccacaacaaacaccaanatnacaaaaacattgtgttacgttccnggtttcaatccccccatttcaaccccg

SEQ ID NO: 4735 - DNA, 364 bp, Aspergillus oryzae
  modified_base (4)..(4): n is a, c, g, or t
gtgnacaatgacgcccatttttcccctgctaccaaggtcctatcacctataagcttactcacccgtgtgcagcagggaccagatttagcctagagtgagatcagatcatcacaacggttcgcgtggatagcatgagcgcaaaacggcaaatgtgccacggcgtgcaagccagtggaggacacttgagcggttgtgtgggggagtgcaagtgagcgcgcagaggggtgcttagctattatctgggcgttgtgagatgcatagaaggagtggggcgcgggttcccagacagtctagggcgggtactgtgttgggttacctcggccggcgttgggagtgacagggacaataaaggttcggagtccct

SEQ ID NO: 4736 - DNA, 486 bp, Aspergillus oryzae
  modified_base (2)..(2): n is a, c, g, or t
  modified_base (6)..(6): n is a, c, g, or t
  modified_base (465)..(465): n is a, c, g, or t
gnacgnccatttttccctgctaccaaggtcctatcaccaggtcatttgtgcagctgccaccctgtcagtactactagtcgacgtactgagcttaatcactacctcattaggctgccgctactttacccgactgggatttcttaccgtcgctctaatggctttactcatgataaccacaacagctggtcctaccggtccaataggactcggcagcagagtaaccctctctgttcccatagtaggtggttgtgcgggcagtttaacatccttaatagtcggaggattgctctgatccgctggcaacacatgagtaaccaaccgtgttacgtcgttccgggtatgtttcaccgctattctgtaaccatgggcaccagcatgatccttgcaaccgtcccgcagcatcaccatcaccacgttcatcatcaacaacagcagcatcaagagcaatgcccagtcccaacaacntcaacaacatcatcaagccag

SEQ ID NO: 4737 - DNA, 370 bp, Aspergillus oryzae
  modified_base (5)..(5): n is a, c, g, or t
  modified_base (10)..(10): n is a, c, g, or t
ccgcngcctngtgacaagacgccagtttttcccctgctaccaaggtcctatcacctccgtgggactttgacactacgctgtgttatatgttggctaagtcgagtactgagatgggttgggctaaatcttatgtggggactgtcgggctagagctcatccggtaacgggctcttacagtgaagtgtattctaaaatattgggcaggtgtgctacagagagtaggtatgctaggctcagagtgagtaatgttacgtgggtgggtcacgggtgaaaccgtgggtcttaggtgaggcgtctcgattacatggggtagacgtatggactggcactctttcaaacaagcaaccgtattatgagtctagttcggtgt

SEQ ID NO: 4738 - DNA, 558 bp, Aspergillus oryzae
  modified_base (390)..(390): n is a, c, g, or t
  modified_base (414)..(414): n is a, c, g, or t
  modified_base (430)..(430): n is a, c, g, or t
  modified_base (501)..(501): n is a, c, g, or t
  modified_base (508)..(508): n is a, c, g, or t
  modified_base (526)..(526): n is a, c, g, or t
  modified_base (539)..(539): n is a, c, g, or t
cccctgcctaccaaggtcctatcacccatcgctaaaaccgcccgcattgggatgattgtgatgatctgcgcgttactggtccgatttaacacgttcttagtccgtgtctaatcgttcaaattagccaccaaccgattgccattcataaccctgtcagtcggatagttataatcccgcattaagataatcttagtcatctcaattgctgacgacatcctgttcttaatgattgcatagggccagttggtgcctaccataggggttaacggatatgcaagccacagcttatcgtggtcatcgtaatcttccggaatcggctgggttcagttcctgatgatatagttacgtcacccgctggagtgtgataaagagccacaggaggatgattgncggggatgttagcccccaatcggnggcggcccgagccagnttacgacatttttggcaaaccccaacaagagaaaattaaccgggcgtccgttcaggatttttcaggccaangggcggncagttcattccgcggttngccattccaggcntcggccgattcgtcggtgg

SEQ ID NO: 4739 - DNA, 370 bp, Aspergillus oryzae
  modified_base (349)..(349): n is a, c, g, or t
cttcctactcttaattgtcggatccacacgtctccggcacctataaacagtaaaacagcctaggtgtgttaaactgagctgtaaacactaaccctgtgagtaaataaaccggcgcatcctggagctccgccttcaataaggtaatagttctaaactctcccaaaggtggtaacacaaacctgagcacttacagttagggcagattccttgggatttttaccgccggtagcggtaccgtttgggacatgttaggtcttctcggactaattccttatatccagggcctgtttaatcaacggcctcagaggggtcggggttttgtcccgattcggcgcttcgcctgtgtttnccaaccggtatcgtgggttgt

SEQ ID NO: 4740 - DNA, 301 bp, Aspergillus oryzae
gacgccagtttttccctgctaccaaggtcctatcaccttatcggcgtcagtgtgggggacaggtttgtaagttggtcgttgtggtggtggtggtgtgtctttccacccgggtggatgttcttggaagatcgggggtgaggagaggtggttgttggttcctttcccggccggcagcacgatgccgtggggaagttcatgattcgtgggtgacaggcgattgggttatataatatagatatataggtcctaattagcgtaaagtcttaatacagtcatgtgcgtaggcagcagcatcatcacg

SEQ ID NO: 4741 - DNA, 363 bp, Aspergillus oryzae
gacgcccatttttcccctgctaccaaggtcctatcaccctagcagcggccacggcgcaaggggtgctagagaggtagagcatagcgatagcctggggggccaataccttaaaatggccgggctgggggggtgctggctgctaacgcaggtctcattgactgcggccgatggggagagggcgccagcgcatcaaacaacggtgcgggggatggtgcatgattagtttaagtgccgcgggttcggtgttattagttcccgacagcccctaccagaggctgtggcaggcacagtgttcgaattttgggcgggggtggggggttggtccccgtgggctggagatagtggcgcgtaggcgtgggtggt

SEQ ID NO: 4742 - DNA, 362 bp, Aspergillus oryzae
  modified_base (19)..(19): n is a, c, g, or t
gaacgcccagtttttcccnggctaccaaggtccctatcaccttgtcgcttcaaggtcctatcaccctgggcagtctcgaggatcactattgtattggtatgcacccgctgcgtgccaatagtaatgttggtcattacgccccgcgccacggccctaaccggtggcttaacaacagttactaccactgccacattgtgcctctgcctctgccgtatcagctggtaattactccgtgctgccttcttggtaactacaaccttaagtgcctagaccgcggcttaggcacgaacttgcttagaaaggcaatacataaaaaccgcatgtggtagcgtttaggcaagcacatagcgcgacgaaggggt

SEQ ID NO: 4743 - DNA, 392 bp, Aspergillus oryzae
  modified_base (8)..(8): n is a, c, g, or t
  modified_base (10)..(10): n is a, c, g, or t
gtgcacangnacgcccatttttccctgctaccaaggtcctatcaccttgtcgcttcaaggtccctatcacccctaaatgcgaggtatgtaagttagccctaaatgcgaggtgagtacttcgcgggtaccagttttattacagcgagtgcagattactatcatcctcccgacgtctatagttcttcctggtactgatcccgtgcccacgagtactcctcaggatcacgtcacggtgctagtcgatgtgccacgtcagcggcgtcagcgtggcacgcattctagctacaatcgcgggcatttatcttaggccagaaaccctgcctaacatacctatacctggtccatactgcaagctaaattatcgcaatgttggcaaggctaactgtgtctta

SEQ ID NO: 4744 - DNA, 346 bp, Aspergillus oryzae
tgacgccagtttttcccctgctaccaaggtcctatcacctcactgtaagagagccacgtagtgtcatggcagtgtgaagctgtgggtggattacgtactgtacggatggaggcacaactaaatctaacactgttaccaatgtacagttcacaatcatatatagaaaaacccttcacaagtttgccacctacactgactgaaaaaacagtaataaagtaacgtaacgtaagtgtacccggctaaacaagcgtcttcatgctaacacttcaaggctcctgtgccacaacatcagtaattaggagtactatagaccaacctaagggtgtgtgcaggtacaacaaacata

SEQ ID NO: 4745 - DNA, 290 bp, Aspergillus oryzae
tgtggacaatgacgccagtttttccctgctaccaaggtcctatcacccggcgcaattatttaccgatctttagctgcaagtatgttcccggaataccgccgggcacgtccagctggtcagtttttgtttgccaactgcacaagcattatcttcagtagttgtcttcctcggattaccatttggtcgtgtttagtaactcgatgtcttcgcatcataaccagcctgtgcagcttcctggcccgagtgtcagcaaaaatcgcttccatctgggcgtgtggttagcgggccac

SEQ ID NO: 4746 - DNA, 252 bp, Aspergillus oryzae
  modified_base (184)..(184): n is a, c, g, or t
gggcttagttttcctcagctcgttggttttggaattaactgggtcacttcttttctcagtcgtaccagctgcacatatgcacactagattgtgtttaccgatcataccacaggctgagttcgtgatagcttaccggagattttccgccgcggccgttggtcaacgccgccggcacggggctcancacaaacggtagcccaaacactggtgacccgcagctcggggtggggcgggccgtatgaggtactcgat

SEQ ID NO: 4747 - DNA, 391 bp, Aspergillus oryzae
  modified_base (309)..(309): n is a, c, g, or t
gtgacaagacgccagtttttccctgctaccaaggtcctatcacctcatcaagcccacatacaccagacgctacagcaccacttgcaccatgtacgacaccagattaatgtcaaattgaaagcgcagcctcctaaaaaagcttgggctaataaatgttttgtacagtagtttcaagagtttgcccgccttatctctctccttcgctccaaccgtgtaaattactatcggtagctccagagatctgctttccatcggggtaagagccaacgaggtaagcatggtatacctgagctttggagacaccgtctntaaaatgccgttggcagggtcgacacctcaacctcatgccaaacactacggccctctgtgcgcacctgcgcccgatgttagt

SEQ ID NO: 4748 - DNA, 323 bp, Aspergillus oryzae
  modified_base (8)..(8): n is a, c, g, or t
gtgcacantgaacgcccatttttcccctgctaccaaggtcctatcacctgaataggcaggaatccctgccattcagccaaagaatggttggcatgcgatcgtcatcctgcacatactcccaagaactattagtacagagtacagcctgatacaacccgtcgtagagcgccccgcgcacgaaacagcttagcgcctgcacggtcatgggttagtcgagacgcggtttaggtccccaggagttggcattgcggttggtcggttggtcattttatagaatatgcatactagaatagggcaacgagaagatacctaccaccagggac

SEQ ID NO: 4749 - DNA, 581 bp, Aspergillus oryzae
  modified_base (397)..(397): n is a, c, g, or t
  modified_base (401)..(401): n is a, c, g, or t
  modified_base (409)..(409): n is a, c, g, or t
  modified_base (429)..(429): n is a, c, g, or t
  modified_base (450)..(450): n is a, c, g, or t
  modified_base (481)..(481): n is a, c, g, or t
  modified_base (530)..(530): n is a, c, g, or t
  modified_base (539)..(539): n is a, c, g, or t
ggtcctatcacccgtgatacataaagattgtagtcttatggtacaataattcggcgtcctgggctagcagccgcaagcctgttaccataaccagtgtttaagtaacgagctgccagagactatcgctgattctaaacaactaccactgtagccgaaacatctggcccctaggggttctcgttagtaagggcacaaaagtcactaaggtcgttggattaaattgcaataagtagcccaactggggcaccacagcagcctgatggtccaacacggtgataaagtgtggccatggtttgagtaaagacggattagtcgcgtgccattggaaataagctcctcgtgaacaaagtcattggcaatggccggttagggtaaccacacgataaccattgccggntggngtgaatgntatacaggagtaattttccngggcccaaagttccgagccgngaacaaattattacagcgtaacaagtcgagnggtagttgggccaagcttattggcggcgccgatgccattccaatgggcngcgagtggncacaaggataaaaccaccagccaggaggcgcttacatttggt

SEQ ID NO: 4750 - DNA, 428 bp, Aspergillus oryzae
  modified_base (215)..(216): n is a, c, g, or t
  modified_base (370)..(370): n is a, c, g, or t
  modified_base (394)..(394): n is a, c, g, or t
acacccgtcagtattagtcattacggaagttcgtgccggtcagccaaagtggcaacacgctgctctaatggtttttgccagtaagatagttgtcgtattccctccgtgtccgggtaggccaacgtatataataggccactgatgtaaccttaaggagaatcgaagtcgtaggcataattggactaagctgggttacaatcgtggtcagtctagtnnatgttgcctggttaactattagcactaataaccaattaaaagctttcacagctagtgctagctttagcaggattctcatacgcggctgtggtctaactggtggcactaagagtaaagtacgtcaacgccccgatattgaacattaacatgttcntcgtagttaggggccgcttataanctccggcaacacacgagtaccaattgggccaagg

SEQ ID NO: 4751 - DNA, 364 bp, Aspergillus oryzae
ccctgctaccaaggtcctatcacccgataggtaacgccctagggtccaccctctcatccgcctggttccaccaccgttgtatttacttaatactaatccccacgtcccagatgagcggtacttaatgcggggtatcaatcgcaaccaggtcagctctagtgagtcccaccacagtgggccttttcgtcggcgtagtcgcttggggcacatccaccaacaccttaggacctcgctaaagcagattattgagccttggccgctcctgcgtggtataaaccagtgccactcgctgtattcccggctactgcacaggcacgtgccgagccgtgccagtaatactattaccaggctcattgtcttcgat

SEQ ID NO: 4752 - DNA, 509 bp, Aspergillus oryzae
  modified_base (428)..(428): n is a, c, g, or t
  modified_base (435)..(435): n is a, c, g, or t
  modified_base (453)..(453): n is a, c, g, or t
ccctgctaccaaggtcctatcaccaatatgcttaatcgtagttcggatggttttatttacctgtggaatgggcttggttcgaatggttggctggttggttggtgtcctgccatgcgtattatgccgctgccgaggctggtggatttgtggcatattcgttcgtcgtcgagcagcagcattgtgccgcaccttcgtaacgataatgtggttggtcagctgggttcttacagtcgtcttaaccacccgcgtaacgtgtgtggtaacccgctgccgctgaatagttgttcgccgcggcttccgctgccgcgttgcgttagtgatcattaccgtactgtattgtggtcctaacaacgtaaagacatcaggcaggaatggtaaggttcgggtcccgcgcatcggaagccccaaaccgcgcatgccatcgatgntaaccgncgcaaaaggacacagagntctaaccccggcgcgaatggcattagacattaggcgccgagggtggcgataaggcg

SEQ ID NO: 4753 - DNA, 368 bp, Aspergillus oryzae
gacggccagtttttccctgctaccaaggtcctatcacccggaaaaccgtattaataggctacgactgcttgcgtagattgatatggatagaggcatacttaaacattagttattagccctaatcataacagtacgcttgaggagctattaattcctcccggattattatacatctactggtgcattcattcgcttagcggtattcaacttgatctacgtagtttcaaacctataggtactcatagtcgcatcacgggttgttttggtgcccactacatatccggcgcccgcaggctctcgttaggcgtccctgggctcacatggtgtataagatagtagccaacgctaatacccccgccgactcatcg

SEQ ID NO: 4754 - DNA, 334 bp, Aspergillus oryzae
ctatacccctcagcaagtactgtgccctccttcccatcaacacacactaatgccgtaagcctctggatgagcgttgagtccccgctctcctgtcactacaggtattcatcagctacatagcctatcaaactgggcccaagccatccacaagtacagtctgcacaaagtcgcattgcgttgtgttgtcgctgcttggctacgagcagagagagaagtgccggcagagagaacgtgaagtggaatctgtgggatggcaatgaggctcccatggctttaacgggcaggcatcccaagtacgaaatggcagatacgggggggccggcttgtagccgga

SEQ ID NO: 4755 - DNA, 415 bp, Aspergillus oryzae
gacgccatttttccctgctaccaaggtcctatcacccagtaggctaggtaagagatccaagactgtgccgctcgccaggccaaacgtgcaacggcacacctgtctcaagcgtaacaacagatagagttccgtaccagtgtaggctaaggtcccaccaatcctaatgacttggcctgccatgcccttgcaaggctggtcgaatggggttctgccatgatctgcgccgcagcagtatcatcgtagccagcccacctttatgcctaggtgaacacgtacgtgtcctctacgtactaagtgtacacagaggcatctaggtcttcaccggtaggcatcacggggatagttcaaaaccatttccaagggcgagtatgccgttatcagccaacggcggggctaacatttatgtgtcgccaca

SEQ ID NO: 4756 - DNA, 521 bp, Aspergillus oryzae
ttcccgttttccccgtcgacaccatcaagtcgcgcttgcagagcgcccccggcaagcccacaattggcggaactatccgcagcgtctacgccagcggtggtttcaaggccttcttccctggatttggcccggctttggccagagctgttcccgccaacgccgctacctttgcgggagttgagcttgctcacaacttcatgaagaaattctttgacgacgagtgaacgcgagttcaatcgatttagcgatatctgacagaaaaagaacctcggctatggttttgtagatttattgttgattttatgtctcaaatttggcgttcctgtgttttttgtttgtttagatctttgagcatttagcgcctggatttcctgtttccagaacttagacttgatgtttccttgttgtctagattggtttctaggaatacccatggttaccggctgtttacagctctagttgcagtatagatggggactgtaaatgatgatggttgtctatcgctctgccgatagatatct

SEQ ID NO: 4757 - DNA, 318 bp, Aspergillus oryzae
tcggcaccagtaaagtcccacgtgtctccccacaagaccttcatggacacattggggcgtaccgcattgaccctgactgtagagaatttgtccgatgaggctcgtgattctcagttggtggttacctatgattattccttctgggatggaatgcgcaaacccgtgaccataaccactggattgctgactgtgttcgccgccgtatgggcgattgggaacattgacgtgagcatcaagaaacgatagagtgtatgatgtaacattgttgtaaccattttttatacttgagcaatgtaactgttaccttcaaagtaaacc

SEQ ID NO: 4758 - DNA, 490 bp, Aspergillus oryzae
gtgccctgaacgatggaacttctggaaggagcgtctgagtcagatcagcgatcaggggggtgacgttggaaaggttgcgagtacaacgaagacggcgatggatcagctggaagataattaataataccggaacagtagatccagtgcattcgatgcggacttggctcccgtacttacatgttatcattggaaccatggaaaacatcaataaacgaagtcaaatcctagtcggatggtggtgcggaacgttggatgagacctccccgatatctcccagtaccctaatcgggcatgagacagcttggtaaaaagctacacttacctgcaccacggcccgggatttctggataaccaatcaccgagtcggttacactctgacagtaaaactatgtgtttattttgacctttcagctgtccatagttcaccatcaggccttaaaagcgtgacatcacgacttctagaagaatagggaactgattaactgccaat

SEQ ID NO: 4759 - DNA, 296 bp, Aspergillus oryzae
gttacgagctgcgattcgagacgagcagcaaacccagcgggcggatgacgactatgcggcggggaggaggtacgattacgggccagctataagaacatgggtgcgatttttggcccgcaaaggggtgattgagagtttaataccaatgggggaggtatgatacggcgaggggttgggggaggaggcaaaatgttccatgtgggtgtgtctttcctgtattccgtactggagaaagatactgtcgacaaccgtatactggtaatggtataatatgatgttaaatgaaaaggtgagcc

SEQ ID NO: 4760 - DNA, 643 bp, Aspergillus oryzae
gaacattctgtggtgaggagaaggcaaaataatatcgccagtgcgtcaggctgctgagtcgtttaccggtcgtctggatatgacgaaaatcctcactgacgggctcaaaaagattcagatattcatcattatgtccactgatacctgggatccagtctgcaagtgtcagaaacgagtctgcatttgatgccctgaacgtcttcatacatctgataagcccctcccggaagtctgctttctctccgtcagaaagcataccctgaccggtttcaatcacggaccgttctgtcaggtaatgctctgtccagtcatacagagccgggtttgtcacccgtataagctgaagcaggcacaaatcagggaaataaacaaaatcccgcatcccggataaagaaaaatcagggaattaatggcctgatggatttcccgtggcgtcgaaagtgcggcaccataggtatcagtcaccgcgatgagatcccttaccattccagagtctggcggttgattattaatttgctgatatagagctcagcccgctggcgaaattcattacgtaaatcaaagcttcagtcggggtatttaaaactaagctgatgattttctgagataacgctgcatcttcgatattcagcgcatgttcaac

SEQ ID NO: 4761 - DNA, 652 bp, Aspergillus oryzae
gccgaagatccttccgggagagaagctgtcagatttcgcggcgcgagtagatcgcgaaatgcccattgctggaatgaagagatctggtaaacccgcaaagtcggatctcgctgatatccgtgagcataaagtaacgaaacatgagaaacatttactccgactacaatcaatgtggcggaaggaggaggcagaaatccaagaacgtgaggctgctgagcgtgaagagcgagaggcagaactggaagaccagttagaattatggaaggaatgggaagttgaggccggccagggcaaggcgaaaaagaagggagctggtgcaagaaagaggggtggacagggtgccgataattcagatccttgggctaagctgaagagtaaggaccgtttgaataaacctgcgaatcctttcgaaattgccgaggcaccgccgcagttgacgaagccaagggagattttcaaggtccgaggcggtgctaaagtcgatgttgctaatgtgccgactgctgttggtagcttgagaaagagaggagttgctacgagagagactatcgtgagataccggagctgatgctgaagagcgataatctcgggagctacgacacatcagtcttgtctcatattgacaagcgtcagtctcagcttcttatcctat

SEQ ID NO: 4762 - DNA, 649 bp, Aspergillus oryzae
tcggcacgagcaccttccgccatggcgcccatttccatgtccaaagatcggccctcaccacaggaatctttcacgcaaatggccgacaaagatctagaatccatcgggcgacactgtcaattcgagtactgcaaccaacttgatttccttccattccgctgcgagtcctgtcgcgggacgttctgtctggaccaccgcaccgaaacctctcataaatgccccaaagccggtgaatgggctcgccgacgaaacgcccagaacgcaagccccgacaccagtctccctacgcagaaacccacgatctacaactcggaccaatgcgcacatctcgactgcaaaactctcatcaacacgatgaaggacccgggcgtccgatgccccaactgccaccgccaatactgcctgaagcacgactccgggagggacacgactgcgccaagatcaccccgctgggcggtcgggcggcgcgcagccaacgcaacgagacgctgcgttcatgttcgccgggtgcgcacatggggcaagagagagtcacgcggcaccagagtctcacgcgactcgaacgatagtcgcgggcgggtgtcagctgatacatctagagtctgcagggagcatgttcgcgcaaggttatctcatgtggtcggcatcg

SEQ ID NO: 4763 - DNA, 571 bp, Aspergillus oryzae
tgccgaggaccgaattgcgcacttgtatggtgctatctatccctagaggttgttgtacggggttgaacgtatactgtttacattgtacgatggtagcaaactgatacccactgaatcattcagtgcgtgggcaaactagcacgcgtcttgtatccggtgccgcagtcgcgtgcgttcatcttatttggacggttggagcatgaatcctaagaggagactggtgtcttgggattagaatctggcgcatcgctccgctagtgccgccgtttcttgggcacagatgttcaaatttttgtcctttgctccccctcaaaatatttcttctacctagtgctctcggaacaaccgaactcaatcttacacagccgttgattccgtggaaaaattctcagattcctgccgctcttcgccatcgggataaatcggttggccccgtatacaagataagcattgcgttggaagagaacctccaatttcataacccctatcttcttgtaacgacaccccaacacaagctacaggcagattactaacccagcccgtctgttcttccatgcatcatcgtctagca

SEQ ID NO: 4764 - DNA, 666 bp, Aspergillus oryzae
tctcgctgaaaaatcggtcaatatcactgagttacgtaaaaacccagctaaatactttattgatcaaccggttgcggttctttctaataatcgccccgcaggatatctcttaagtgccagcgcattcgaagcgttaatggacatgcttgctgaacaagaggagaaaaagcccataaaggcgcgcttccgtccaagtgctgcaagattagaggaaattacacgccgcgctgaacaatatcttaatgatatgacggatgatgatttcaatgactttaaggaataaggatgcgggtattcaaaacaaaacttattcgcctgcaacttacagcagaggaacttgatgcgttaacggcggattttatttcctataagcgtgacggtgttttgccagatatatttggtcgcgatgcactctacgacgactcctttacctggccattaatcaaatttgagcgagttgctcatattcatctggcaaatgagataatccatttccgccacagttgcgccaattcagcagacgatgacgagcgcatttggtatattgtcaggggcgtttgatgagcagcatggttgctcattgccattctgaacctgacctcataaactggctcgagggggggcccggtaccagcttttgttccctttagtgagggttattcgagc

SEQ ID NO: 4765 - DNA, 686 bp, Aspergillus oryzae
ggttgtgtcttacctggccaacaccatccgtacacagatggaactgtccaaccgcttagctactgcccagctcacccttggcggcgagtccggcaatgcagagtccggccagcgtggaggtcagagaggcggcaagggaggccgcggaggacagcagcggactcaagaccggagtggagaggaggctcgcgcgtaaagagggaacgtaaaaccaaggctatccatcaagacaccttttcttttctctttacatctcttgtccatccattttttacttctcgcatctattatcccgctactctgtttatcccttttttccttgatatgtgtctagggttctatctcgtccagggttatcttttcctgtggaaaaagcttgttctcagttctgcttccaccatgtgctctctgttatggcatttatgacattacatccgtggttgttggagcaatgcgaaaacgaatggacaacgaaagcaaagaaaaaaaaggaaccagaaagagcatggcgtatggagtcaatctggctttgttcagagcggtgaaaaaaaaggagctgtgcaaatggagagcagggttgagaccttttatgacaggacagatcgctattgctcgatgatatagtgtagactgatgatacgagtcggctttctaccgcatgtcatcatgatgatggctatactgac

SEQ ID NO: 4766 - DNA, 686 bp, Aspergillus oryzae
tcaggccggattcactgaggttatgtgtttaacaactcatatttcttaatcttgcgatagagcgtacaatgccgatgcccagttcatcagcaacttgcttcttgctgttatgacgtgaaagcgcctcgcggatcatttgcttttccatctcctccagcgccgtgccgcccgcatcatcgagtgacaggtgcgcctcactgacctctgttacatcactttgctccgttgtgccattattcagcagatttggcggcaatagcgtgctgtcgataacttcacctgaaggaaccacgttaaccagatattccatcaaattgcttaactcgcgcaggtttccgggccaacgatgcttacgcaatatttcgacgacatcgggagcaatgccaggataaaccgatcccagacgacgggtatgcagatgtaaaaagtaatgcaccaatagttcaatatcttcctgacgttcacgcagcggtggcagagttatcgggataacattaagtcggtagaagagatcttcgcggatttaccttcggcaatgaactgggcaaattctgattagttgcagaaatgatgcgaatgtcgactgtatgggctactggcaccaatcggcagaatttcacgtgcctcaatagcgcgcagtaattagctgcaacataatgcatacacctatttcatcgagaacagcg

SEQ ID NO: 4767 - DNA, 414 bp, Aspergillus oryzae
tcggcaccagccgtgggtggttatgagatctacatggctggggacgacgaagaggagggtgacgcagccatctaccgctctgccgccgcggatgaagatgacggcatcctattcagcactgctgctggctggaaccgacttagtattgttctgcgcgacacggcaccctcaagtttgtcaagtacgtcagcgctgccgccaagggagaccggtgggatatcaccggcgagatgggtgtggagtttaatgatgatgacgaagacgaggatgaggacgatgagatggaagctgacgaggaataaaatgttatattttggctaatttcaattgtccgtttgtatatacaatgacttttactattttcacgaccaagcattaggcaccacccaaatgacaaaagtagattgaatgttt

SEQ ID NO: 4768 - DNA, 523 bp, Aspergillus oryzae
tcggcaccagggaataacaaccaacttgctagaaaatcctatcagagtattgcgggtgtcgtcaaagttttctctgtcccccaaaaagagaagaaaaaaaaatccctcatctccttcggcaatctccagctgtcattgtcttggcccaataattgatagcaataaaaacttaatctgaaaaaggttgaatcctgacaacctgtcttgctgactgctgcagttgactgtgaataaccgtggatctaccaccgtgcatcgtattctcttctcaacgtccactcaaagttcttcgaaacttcgtcggggaccttgttgcacgcgacgtacctgcccgaaccttggatatcctctttctcctgatgattcgggcttcaagtaaagtttgacttgccttcccatggctttggcgggtccaatttcgatctcgattgctgtatctattggatgatcttctctctctgtttgactctgtaaggcaaagaagttggagcgacgaggatcacatcaccacacaaactcatat

SEQ ID NO: 4769 - DNA, 683 bp, Aspergillus oryzae
tcggcaccagaatatccctgcatcgcttttaaccctcattattgagttattatcacccgcagcttgtgagaatgcaaaattccctctgccttttgaacgttatcagacgctcgtcctggctttgtcgattctggaaaattacacaatcctaacgggcccattggatcccgactgctgcaattccttacgctcgcttactcagtgtcataaatttctctatccgaaccagtccgatcaaagccggcggattctgattctatacattcgggtactattgaaccttaccaacaaggactcatctctttgtgaggagtgttccagaactgaaattgttggcggacttgtcaaggtcatcatttcggaattctgcgctgtgcctgaagaaaatactggtaaagaatatagctcactggatgcggtaatattagctttggggtgctcttattaatcttgcagagaaagtgatcgtcgagagctatttttctggagtcaacaaataattccgatcttcttggatttgctcctacaacaattttctaccagcataagtctgcgcccaggcacactccgtccccgaagtgcagcataatgttgctatcggggtacttgtcaattcttctagtcacactttgtttgaatcacatggcattggccaggtcaaagtttccctagacggcagggac

SEQ ID NO: 4770 - DNA, 664 bp, Aspergillus oryzae
tccgcgaagatctctattaccgcctcaacgttgtcagcctgaaaattccggcactggcggagcgcacagaagacattccgctactggcaaatcacctgttgcgccaggcggcagagcgacataaaccgtttgtccgcgcgttctctaccgatgcgatgaaacgcctgatgaccgcgagctggccgggtaatgtgcgccagttggtcaacgtgattgaacagtgcgtggcgctgacctcatctccggtgattagtgatgcgctggtggagcaggcgctggagggtgaaaatacggcgctgccaacctttgttgaggcacgtaatcagtttgaactcaactatttgcgtaagctgctgcaaatcaccaaaggcaacgtcacccacgcggcgagaatggcggggcgcaaccggacagaattttataaactgctttccgacacgagctggatgcaacgatttcaaggatgattggcgttatgtgttacgtttagcagatcaaaagacagcgactttttcaaggatagcatgaaaagattgatgcgatatatacccttcaagctggacgatgtcgcgacgactggcgaagtcggtattacggcatgacgtgacgagtgaaggcttggtcgcagaaggcataccgagctgtaccgcggcgcggagtatat

SEQ ID NO: 4771 - DNA, 641 bp, Aspergillus oryzae
tcggcaccagtttcaaactcacccctagtcactctttatttggttcgacttctttttgctttcgctcttctctttagatccccctattgtggtcttcctctttgattttgaccttcttgtcccttatctcccctatcttctccgtgctggcgctgtagtcccgcgccgcttcaatggaatatgggtcctgatcaacatgctcaattggatcgcttcagtctctttcttccttttccctatcgtgtggccgtgattttggttgcaggtaagctgagagatactggcgctttacttatgttagattccgacgatgttgatttcaatgtacaggcttctggggttggggggtcaatctccaatatcttctcaagaagaacattgtaggttaacccctctattctttttgataccttccctgaataacatctgaccgttctcgattaggatgtcccgcgctcatccgatatcctgccgtcactcttcgtccagcgacccaccacgtctcgacataccacctagctactctcttgacagtccccttctgctctcactacttatattctgggcgcgaccatggctctactgagaaggtcgaatcgctggattttattccacagtcatactcattatcttcttcataa

SEQ ID NO: 4772 - DNA, 555 bp, Aspergillus oryzae
tcggcacgaggccgtgaacgctttggctgataaaggcttcacgccattacatcttgctgtaagcgaggggaaacgggatatcattcagttattaatagatagtaatgcggccataaacgctttaactgatgaaggtttgacgccattacatgttgctgtaatgggggggaaacgggatatcgttcagttattactagacaatggtgcggatgtgaatgcagagaagaatgggataacaccgatatatcgagctattcacaacaaggacgagctcattactacaagcctcattcgacatggcgctgaggtagatgcaccactggcgttggcaatcaaacaaggtgatgaggatatagttcgatttatcctccagcatgggccagaaattggtccagaatatctgatctatggtaaccgttctgggcatgatcacattttgcagcttatggtagagcactttcttgcaaggacgccattgactagatagcaccttttatgtgggatgacatgatgtcgataatacttagataattgcttaacattgtactacacatg

SEQ ID NO: 4773 - DNA, 554 bp, Aspergillus oryzae
tagcccacaccggctaagccgactgccgccctatggccgatcttactagtatgagaataaccttccgagtcttggagataggagcactaaagactatctactcaaataaataccgccagctatctcgcctaactcctagtttttatcagcctttatcctgaaaaggcgtgccacgaacgtatcgttttcataccataccttaccaggtatcattgacagctaagaccctgtgtccaccacaaattctccgtatagcacacaatctcctctctatcactcatctctcctaccgttctttttctatctttatcgtccagcttagtcaccccgtcttgaaaaagatcgcatcatctcccaacctaaagactcatctcagtcgccactccgggccaaaagagaggaaactccgaagcccaatttttcgagggtgacggaaacggctcctgcgcccccactgtcgaacaatttatctctcttggtggaccgttggtgaccggtttgctgtaatctggacagtgacggtcgatcagtcgcaggctcatactatttgcacc

SEQ ID NO: 4774 - DNA, 695 bp, Aspergillus oryzae
tgccgagcacgtcggttgtagaactgtgtgtggaatcagtcccaccatgaggttcggctgaacgagttgtggcttcaccctgacgtgcacttggctcggatggtgtatattggtaacgctcgtggtttgcaggtgttgcacaggaacaacagtaacaagaagatgaacgtgtatcttgcggctctgttgatgaggcagcagcggaggcaggtgatgggtcactccgtgacgttgatgaaccctcttcttcattgacaccaggttggtgtgaagttctgggctcacagggtcgacgacaagaacatgatcaaccttatgaaaaacaagattctgaacaacagggttcacgtgttgaggcacattcgtcaacaggctcacgactttcagaacttgtagtggcggttgacgaacaagatgaaagttcctctggagcaccatcgtgacaaggcggacagtgtgcgtaacgtcgtggcttaggactggaggaactgccctcatcacctgaggtgggtgtgtcagtatctgagggcgatcggtcacgaggacaacgaatgtagtagatgagtccgcactgtatgaaccgtctgcgaactgtggtttggttcagacgtgaacgacaacaagtttcaccttgtgtggtcctcaggtattcatcactacgttgatgacgttaacacttcatccgaacacgttct

SEQ ID NO: 4775 - DNA, 674 bp, Aspergillus oryzae
tcggcaccagatcattgccatttacgtcatgctaaagaccaaatagtgctttaactgaggatctttaacagcgtggcgttggtttttcaaaatgtcaaacgatggatatgactggcttttgaattatccacgaccggacttatatcacgttgatcatagatatggacctgcttctggaccggcacaaggagaccaggctccgtatctcggtgcgccgccagcaataaaagctgccacggtcagcccttccggctatttccactccccatatcacctacctaaccaagagtttatgagttatacaaatagcaccacccagtaccagtctgccgctcccatgccaggttcttaccagggaccaccaccttactctacgccgtcaactgctccagtgacctcccaaggacaggcctctcaacagcccctcacttattccaatacttcatggaatccacaccccaaacgtcagactatggccatgatacgaaaaggcgccgtacagacacttttacaccatcaaacagcatggcataacactacggtcactccgccatgtcgaaacctgtctcaaaagataatctctcgtcttttcttcagccccgtgatactacagacaaatcatttctcaagaacgcgcggatattgtcaaacccttaacaagctagatgctgctg

SEQ ID NO: 4776 - DNA, 692 bp, Aspergillus oryzae
tcggcacgaggtaagcctgtcgtcttattctagtggtatatggcagattgtattgaaggatatcggactgggtgttgcgacaggaggctcgccgttcggctttacgagcaagaatgggctgttcatgcaaagcaatggcgccgcgctacccaagtcagtcacgattgaccctacaaagccttatatgtatcttcccgaagccacctgtgacgcgatcacttcgtcgtttcccgtctcgttcaacagtggcttgggcctatacatctgggacacgaccaacagtaaatatgcgaatatcacgtcctccgcgacatatctatccttcgtgttcaataaagatggtctcagcgatcaaacgattacagttaaggttccctgaggctgctcacgcttacgctgcaagacccactggtcgaccgcaacgcaacttattttcctgtttccattcaactgataccccggttctcggccggccctttcttcaggctgcatttgttggtgtcaattggttcgaagggacaacactggtacatggttcttggggcaagcgcaggccaggtcttctgaggcggatataacaacattaatgtcgcggacgcactcttgcgcatcgacactcctgggagagagctgggctaaatatggcgtctttacagatacggctcgatagctccacagctctaatagtgtct

SEQ ID NO: 4777 - DNA, 677 bp, Aspergillus oryzae
tcggcacgagccgcagacggcatgagacatttgaccaatatcttccgccgcctctaccgtatctttgcgcatgcctggtttcaacatcgggaagtgttttggcaggtcgagggccacgatggactatatatctttttcaagacggtttgtgatctctacagcttgataccagaagataattacaccgttccggctgaggcggagggtgccgatcccgtccaaccggcagaggaggagacggacgggcgtcgcatgacgatactgcggaaagagggtgaaggttcgctgcctgccacactgcaagaaccaccgtcggcgaccactcgacgtcacaagaataccccatcaacaagttctcgggttacgactatccgcgatgtcacaaccatcagcgaaagcgccgaggatgacgagcaacagccaaagcagcaagaaagcgaaaagcccgcagaaccggcacagaaggaaccagagctcagccacccgtggaagctgtcagtgaagagccaaggctctaacgaacaggtgtcgattggtagcaccgagtctcaaattacgttgcagagtgcagttgatgagagacgagcagctccacagcgtcgatgcagataccagataccgacagaggatcaagctacactgaggagcgtgcgcagagatgagccgaacactcacgg

SEQ ID NO: 4778 - DNA, 683 bp, Aspergillus oryzae
ctccaggctctactgtttgtagtcggtgtggggggcgtgtgatgaatccaccagtatcacccgagacccctttcaatccgaatggctcttccaatgggactggagcctcattacagcacgaagcgatcacaggacgcagttatccgtgccgatctaaagactcagaccgaccctcgaaccctatcaagatggggagcaatggagagtctctcccgccacggcaacgccaatgggaagagactgtgaatgggtctccagactccaagcgtcgccgaatcagcacacagttacccagcaaaccaaatattcaccgagatagaagcccggatggctcatacccaatatcaccatacacagctcgcccagaggcaccaagctcccgcgggtcattccacatgttgcaacctccacgaccgtaccgaagtgttcaagagtacccccagcctgaccccagtctgaagctccgccgctacaacaactgcacctgtgtcagctctgcgacgcagcgactcaatatgttcaggaagctcagtttggaggctacagtgatgactatcccatttctttaataagatcaggtactcgctaaaatctcactccctctccgtctttcgtgatgagctcacgagacggggagcgtgtgtcagttgacggcagactatcgctgtgagtcagtggttgac

SEQ ID NO: 4779 - DNA, 682 bp, Aspergillus oryzae
ctcaggctgttataccctcgcatctgtaccttaactccaaactccaacgtctcagtcaccatggtgggcatcaatgaagtccgcaaatccaacgtcgctctccacgccctgcgaaggagacttcgtcgcagtcttcgtgggaggaaccagtggcatcggcgaacaacagccaaggagctagccaagaccatcaaaaagccgacaatccatctcgtgggacgaaatcaagccgccggatccaagatattagaggaattgaaatcagccaatcccgatgggacctttcattttattcaatcggacgtctcacttctccggaatgtagacgaagcgtgctcggaaatcaagcagaaggaaaaggcgatcgatctattattcctctcgacgggacatcttgctgcctcgaaacaaaatacaagcgaaggcctcgaaaacaatcatgccctccgttactactccgcatgcgcttcgtccacaatctcctcccgctgctcagcgcatccaaagccccagctcgtgtcgtgagcgtctagctgccggccaggaggtaaatcgaagagataactcgacttacaaagtcgtggtcatcatgaagcggcatgtatgcggcgacttaaactcctcgcgcagacactggcagctgtaccatcatcagttcgtcacgtattcccggatgtcgaac

SEQ ID NO: 4780 - DNA, 681 bp, Aspergillus oryzae
tcggcaccagccaataccaatatggctttaccaagcatgtatctatgatttgtcggtcacagttcacgccgtccggtgaatctcgtgagaagcccgtggtcgttattgctgccagctcaccatacgatttcgcaatggatccctcgatcgggacttatatttgcacctatgattttacggaaacggctctagaggcactggttaagattctttacggggagataatccccatgggctcattgccgggatccattaatcgcagccagaagctccaccaagcaagacagcactggctggtggagaattggaacgaagaacgggactcacatgctttggattcctcttagatgcggtgagagaggactgtactcagacgcaacgctcggagctgctgggtgtgacatcttgcagcttccttctgcggagagaggaaattgatgaagcacattttgttgtacgaaacagcagcacccaagccctgtacgggttctgctcgacatacttctttcgatcaacaggcaccggcgtcattgggggcttgattgtcgaccggcacgacggaagctatcaattggggctccctccacacgcgctattcgacactcgtcagcgaaaggggtcagaggtcagctcgctctcgcttgccgggatatactagtatcgtctgcaacctgtgagaga

SEQ ID NO: 4781 - DNA, 674 bp, Aspergillus oryzae
tgccgagcacggcaggggtggatgtgggttggatatgttgggtagtttgaaagaatactaagccgacgaataagaataagaagaatccggcgagggttaggcggagggcgagggttgggtagcgggggcaatgggtgtaggaactcatgtgatgcctccaatggtagtgggaattggtggggttggtgagacggtgaagcctcagtgaggcgcatggacaaagaccctatgggagggcgcggttggtcagtctgccctagcccggattcacgcaaaggttgagctgggcccttcattcgcaggccacggcatccattctgcaacgcgcgagcccgtaacttgcccattcattgcaaacagccagaccgccctcccaagttgggcccccgcaatcaccctattttgcaatagttcacgagcaatcccacgtcctcggcttccacactcacacgcatcagcaacttcagttccacattgctttgcacttggcaatgacttcgatcgccgtatcatcactcgtcttcaaccgacatccgtccccttatcattcacggttgcacacacattacacatattcaccccacactatgaccctacttgttgctgtcccgtagtcaccatgccctctgccctatgcttgctcttccccatcgtcttttgattgaatgtcgctc

SEQ ID NO: 4782 - DNA, 686 bp, Aspergillus oryzae
cgaggcatcaagtaactcaactaaccgtcgaacttcagaaccctcatgcggcggcatgccctcccatggagcactcctactcgaccagcagtgaggagtccatgcagtctcccatgggatattatgatatgtacagcatggcgagcaatgatttcgagctctaccatgcccagtccaacgcatcctcctattcttcctcctacccatcttccaactattcctattcctccttcggctcctatgattcgggctcttttgaggcgtcttcctacgactctggctcctatgaatttaccacgcctccgcccatctactgcccaccggatctcaatccacagttcgccccacagtacttttcctccccggttcagggcacatggcccactccccctgcgcaggtctcacctgtggaggagatcccctaccccccactggagaccactacactccgtgcgagacagccaaaccggtgaagcctacgtctgtgagtgcggccgggcgttcactcgaccggcggacctgaagcggcacgagtcagcgtcacaaccctgtcttccaggactgcccggtgcagggatgcatcgcaaggacagcatggcttccgcgcgagacacttgattgagcatctgcggtcgtacaccatctcaatgtgcgagcgcgtgcgctactagcgggtgcaagcgctt

SEQ ID NO: 4783 - DNA, 588 bp, Aspergillus oryzae
ccagctgacatctgtcattttctcatctacacaaatcactatttttattgtgttcgcatactcagacataagatccaagtcaaaatgccgactgcgctagatcgagcgatgcactcaaagaatctttttctagggtttgctggcatggtcaccgctgcagcggcctgggccatatggggtagcgacattttccctgcagaatcagacccaaccggagatcctgaaacttggactgttgaagagatgaaaaggtggctcagtaacaggggacttatgccgaacaatgaagccacacgtgaagagctgctggagcgagtcaaagcaaacctccgtataccgtcgaggtccagagcatgattatcctgtcgtgatttgtgcattccagagctcacgttccatccgtgcacatcaacaggtgctttcagtgtttctcttgagtttttgttcgtgttgcgcattgaagtattttgtcgcttttgtactcataccccatctataataccccccccattgtatccctgataggtctggtgattgatgcacagcccctaaagatgtactcctccttgtgaatgagaattgttcttt

SEQ ID NO: 4784 - DNA, 690 bp, Aspergillus oryzae
cgagtgcacactcggagcaagcctgttcaaaatggcggtcgcattggctaaggaagagatggactacacaatcaagccagagtctggcgcctccaacatttccacatctgactggccgcttttactgaagaattatgacaagcgtacgttcgcattttacctgtattctcgcagagctcattggtattctggcttcgatgagttcatatattgctctagtgagtagctttaactgattgcaccttttacagtcctcgtcaggactggtcatttcacgccaattcccgccggttgttctcctctgaaacgtgacttgaagtcgtacatcaactctggagtgatcaacctcgacaagccttctaacccatccagtcatgaagtggttgcttggatgaagaggattttgaggtaataccacaaagatcaagtcaaataacaggttgctaaatcccttgtttttattcttcatcagggcagaaaaaactggacatagcggtactctggacccaaaggtcaccggttgtttaattgtttgtatcgaccgtgccactcgtctggttaatcgcagcagggtgctggaaggaatacgtctgcgtgatccgcctccacgacagatcccgggtgtgagctcagttcagacgagcccttgagacgttgaccgtgcacttttccagagaccgccattgatct

SEQ ID NO: 4785 - DNA, 476 bp, Aspergillus oryzae
cgagggaatccaggaagaggatggcgccgaagagcagttcgtccgactgtcactcaatgggaacactgtcactggtgtagtgggagccgctgaaggttctgaatcgtccgatacggaggatgagtccgccgatgatgtggacgaggactcccctttcttccccgagttccgtctcgtgaagcgtgatgatccggaagcttatgcatttaccacaccacaatattctgctcacaagctgccaaaggaggtcgtcgatgcctcgatctcaggcccaggtggtatgagtgagtttttgggcaaatggcaggatattctagccaagcaggcacaagagtcggatacggatagtgatggtggacaatgataagcttcccagctttattgcaacggagtaatcggggattggacggcgttcatgagctaacgggtagggaaaagcaacggggaatatattttctaatgaacacatcatcttt

SEQ ID NO: 4786 - DNA, 685 bp, Aspergillus oryzae
ccagatcattgggggtaagaacgacacctccagtaccgcttcggcaggttacgttcatccgctcattcgatctgctcacgttattgagtcgtccgccaagacaccatccgcatcggaggcctctggtgacaacgcaacgccccagaaatggtcggtctccagccagcaggcgtcttccgtggtggaaacacctcgtccgtctgcccaccctcaacccagtcagcgcaatacgccggcgaagccgcggatgccttcttgggctcgccggctacccctcatctgtcatcactgatgcaactcaagggggtcggactcgatctggaccgactggttggggaagcgaaaacccccgttgatctgagcgcctactcgtccgacgagggcgagtcggacgtggagccggcccagccgtcggtcaatgcgagtcacggtgaaaaaccgactgaagctcgcattagccggcaacccatgcggaccacagctccacaagccgggtcgcggcgccccagtagccgaaaggggtggacaagacgagtcataagccctcaccttggaacctgacgccaacgcgggctgcgcttatcaatctcgtacggccacctcatcagtagcccgatcgatgacttcgtctcgtgaagtcgatgggatcgatcgctcggcaatctagccgacactgtcgaatcga

SEQ ID NO: 4787 - DNA, 692 bp, Aspergillus oryzae
ccaggctccccaaaggctctgttctcctccccggagccaccctacggattcctgtcgctaatcgacctgatctttccaatcttctttcgtcactggttgaccgatcatcggtcgtgaagcgagaggggaacgtgatcacgttcggttgcgttccccttaactcgccgttcttaagcaaggatggtcaaaagttgattgacaatggagccttggatgaagataggagagaagagtacgatgccattgatgcaggccaggcaaggaaagacgatctcttccgttatggcacaatcggcaaagttgttggcgtccaacgccgtgcctactcagaagcgtcccttgtggttcaaggaattcagcgattcacagtcaaacgcattctaaaggaaagaccatattttgaagcagaagccatcttacatgatgagaaaggttagtctaagaaccgtccttgacctgtggtgccaccgaagctgatgggttccttgccttttggacagactacgtgtctaataattcagaaactgtcgagctattccagcagttgaggcgactctccagggagctactgacctactacgactttcatcactgttgcttcttcttcaacacgcttatcgcactcattgcacgtaattcgagctgtttatatctaaactgatttacacaggcggaggtggcgatttatgcag

SEQ ID NO: 4788 - DNA, 567 bp, Aspergillus oryzae
aattcacgcccaagtctggcgtgaagatccaggcagatgagaatgaggccgacccgaacgctggaaacgctggctcatctttcgatgataacgcggagatccagcgccttgtcgactcgctgccatcgccgaagtcacttgctggattccgcttgaacccagttgagttcgagaaggatgatgataccaaccatcatattgacttcattacggcggccagcaacctccgagccgacaactacgaaatcccccaggctgaccgccataagactaaattcatagctggcaagatcattcctgctatcgcgacgaccaccgcgctggttactggactcgttgccctagagttctacaagattatcgacggcaggatgacattgacagtacagaacggctttgtgatcttgcactttcgttcttcggtttcagtgaaccattctagcccagggcaatacagggcagaggtgagtgacatgatcagctttggatcgcttcgagtgacgatattctctgcagacttctcagcactctctgacaggtttgaatcagcatgtcgctcgagtgagc

SEQ ID NO: 4789 - DNA, 335 bp, Aspergillus oryzae
gaattcggcaccagggagaatgccgatccctctatacaaagttctacacgtgtgtctcctgtcttggagatgagtcacgtactgattgcaggtgggggcgcgaaggccggtgatgaggccccggtacagaatacaaaggaggctacgctgggaagatcagttcctagtccgggatcaactcatttgtctacggatgcgggcgcgggtgcccctgccgctaagaagaggaagctgtctcctgcgagtaaggaggctaagcaacaggagaaggaagctaagcagcaggaaaaggaggctaagcagcaagagaaggaggccaaggaacgtcaaagatt

SEQ ID NO: 4790 - DNA, 684 bp, Aspergillus oryzae
tcggcacgagccgaggctctagaacatcatgcagaccagcgcgaacggaagcggggagaaaacctgcaaagcggcctatcgtccctgaggtcgagcgaggagtctaagcggggttctagaggcactattgagctgcccccgttgcaaaagtccaacatcatgattgatcctttacccatcagcaaagaaaaggagaaggttctcacgagaacacggcctagttggcttcctcctaaggatcagaaggaggaaaagaagcatctgaaagagtacaagagaatgatggcgcagtcacgggaagcaggtaaactttttctggcttgctttacggtttgtcttatgcagaacttactaactccacttcaacagacaagcgccgggcggcgaaggctgcctcagccaagtgcgagaaggacaacacccgagaaacacttcagcgtatctgggatgattacgtttacccaattgggagaatgccataggtgaaacagaacacgtgaactgtggtggcgtgaatacctgctcgagcagaggacaacctggcagcgcgccatcgcaatgagctgtctttgtccgaggaaacgtacaagaagcattgcagcgcgccaaagacgtacgtcaaggcgatgcgacgctggagagagtaacaaacgaatgcgagagtggtttgagcaattgaagccg

SEQ ID NO: 4791 - DNA, 685 bp, Aspergillus oryzae
ttcggcaccagatcagttgtagcacaggctgtcgtaccggacgagtcaacagatacaaagacagtaatcacatcctctatcacacccccaccacagccttcggtataccccaatgagatcatccagctcaaatgtttctatgggtggcagatgaccgtgaacgagcataacaagcgagtcctgagaggggatcttgctgccgcaaaccgtctggatcggaaatgggctgatttacatgatggctacagaagaagcaggcgcggcaggtgctggtgctagaagaagacggcgtcgagctcgtgaagccgaaagaatttacaattgctgacgacgaaggtgatgacgcctatggtatcgggggcgtctccgccttgggggaagacgcaggagagcacacagtggtgggtcctgtcttgtcatgtgaggcagtcatctttgcctctcttctctttaaacagtcttcacgttgaacacaaagcatctacaggcgtgctgtaagatgtctctgtgtgtgaaacccactctttcagctacgagtctggaaaccctgtgaatgcgtctgccattgtgctttcaactaaaaaatggcagccgaaccatgttgccacgtggcgaacggaatgcataactcctagcacagagtatgccatgagaaatgatgatgatttgtgcaaccggttgataa

SEQ ID NO: 4792 - DNA, 706 bp, Aspergillus oryzae
gaattcggcacgaggagcacgttcaccctcgatgtcgatgccaacggtatcatgaacgtttctgccgtcgagaagggcactggaaagaccaacaagatcaccatcaccaacgacaagggccgtctctccaaggaggagattgagcgcatgcttgccgatgccgagaagtacaaggctgaggatgaggctgaggcttcccgtatccaggccaagaacggccttgagtcttatgcctactccctcaagaacaccatcagcgagggcaagcttaccatctctgactccgacaaggagaaggtcaccagcaaggttgatgagatcatcggttggcttgacagcaaccagaccgccaccaaggaggagtacgagtctcagcagaaggagctcgaagggtatgtgatatgaaaccccttttatccctccatgactaatatgatgctaactgtgcgctagtgttgccaaccctatcatctccgctgcttatggcggtgccgctggtgctgctcctggcggtgctcccggcgctgcccccggtggctccactcgcaccgctgacgaggttgaggagaagcccgaggagcttgactaaatctcttgaccggcaatgtttttcttctacattcttgctgtttgcggatgggcgatcggcttttaatgtttttgttctttaatactctctgcttgtttctttttaacgaattatggg

SEQ ID NO: 4793 - DNA, 701 bp, Aspergillus oryzae
gaattcggcacgagatcttccactccaccgagatcctcgaggtagccgagcataccatcaacagcgtggtgacggagctaatcacgctggcgagaggagttcacggacattgcttcgaaggcccgtggcgcgcatctccaaaccggacagaaattggcctttgcagcgaaggaaatgcattcgcttaagattaggtcgaaatcgctgaccgatagattggataacgagattaatcttgcattcaatctagtcaaccaaggcttcggccggaacgctcaatccgacagcgcgatgatgaaaaccatcggtgttgtcagtctagtctatcttcctgggacatttgtttcgggcattttcggaacaaacttcttcgattatcaaagcggcgaggcggaatcatgggagatggccaagaatttctggttgtattgggccgtgacgcttccgctgacgctcgcgaccgttgtggtttgggcgctgtggcattatcggttgacgttgaagaagggatattggaatgggaagagtaagttaatggagatgaggatctatggaaaagtttaaatcctatcaccctcttcctttacgttgtttggtcttcttgtgagctggcctgtctgtttttttatatgtcttatgaatgatggtgggattttggggtcagggtaatatatatctgtttgatgttgtgttatcattag

SEQ ID NO: 4794 - DNA, 645 bp, Aspergillus oryzae
gaattcggcaccaggagccgttgcgtcgattcgagttcgtagcgccagctgcgcatcccgctgggttctcaatcggcgtgatgctggcagcgcccaacaacccctttgtccatgcactcgttgagaacctcccggtatacaaccaagtctggccactgttaccctatgcgactgtaatgttcagtacaggttgtcactacgcgtcaaccatcttcactctacaatctaatcgcacaaacctccggattttggcaggacccccagatcagccgaggatgcacatgctcaatggggtagtgaatacaccactcttccgacatttcgggtcttcttcctggcacggtcatgatgcgcggttgatccagttcttcaaagatctcgatcagcggatattattcgccgggcttgtctttgtattgggcagtacagcgttaattatactgctctgtatcagtcggaggcgtgcgccaaaggcagacgatgaagaacgtcgcttaccatcatttacgatcaagtggatgacaaagatagcttaagtggtacaggtcagagggctggtatacactataatattctgctttgtgatattctcatagcgtatatacaatttaagctatgtgctttcatcttgtcgttagctcctgt

SEQ ID NO: 4795 - DNA, 274 bp, Aspergillus oryzae
gaattcggcacgagggtgattcattccattcatggtttgctctcgtctctccttcaattcctctctcccagaacctacctagatgacgtcgaattcaatttaattgttcctcgggagaatatcacgattagggtcgccattctttttttccgctcaacaactatcccttttcgaggtatatcgtgggtcttgacaccagtgaaacccaacagatcctggtcccaatcgctccttttatagtaccacgcacgcatataggtctgggaaaggaagt

SEQ ID NO: 4796 - DNA, 506 bp, Aspergillus oryzae
gaattcggcacgaggttgaggacaaacataagctcacagagaccgagcagaagaccaaagaatacgatgaaatcgcgttccgctatctctatattgttgccgtgcctctcctggctgcatacgcagtgtacagcttagtctacaacacccacaagtcgtggtattcctatatcattgaaacacttgttggtagtgtctatgcctacggtttcctgatgatggtccccagcttgtatatcaattaccgcttgaagtctgttgcgcatatgcctggcaaagccttgatgtacaaattcttaaacaccttcatcgatgatcttttcgctttcacagtcaagatgccgtggcttcacaggcttgcgactctccgtgatgatgtcattttcttcgtttggctttaccaaagctggaagtaccgggttgattatacacgtgtcaacgagttcggtcagggaggtgatagtgatgctgaggaagagccaccagccgttgaagctaaggatgtc

SEQ ID NO: 4797 - DNA, 385 bp, Aspergillus oryzae
gaattcggcacgaggttctacagctccaagttggaggaggctagcctcgacaaggctcctcgtcgtgaccctgagctttacgtcctgctcggtgtgatgtccggtgctttccttgctgctggatggtagacgcccttttccgcacccactttacaacccacgaccggccgcaaaaattccccaattgcacgtggaagcgaaacaaattactaacaattctttcctcataacaggtacttcggcaagaagcccacctccgtgacctccgagagcaacgtgcgcattggcgacagcgccatgccttgggagcgtgaggacgacggcaaggtctacaagtaccagtaccaccctcacggtgacaagagccagcctctcagaaacgccc

SEQ ID NO: 4798 - DNA, 318 bp, Aspergillus oryzae
gaattcggcacgagggcactacggtgtcacagatatcgactgggatcctacaggtcgctacgttgttagcagtgctagtgtgtggactcattcgatggaaaacggctggaacattcacactttcgccggtcagaccctcgctgagcaccctaccgataaattcaagcagttcgtttggcgtcctcgcccacccactcttcttagcaaggaggagcagaagcaagtgcgcaagaacctccgtgagtactccaaggagttcgacgaggaagacaagtatgctgtcgacattgccaacaccgccgttgtcgagacgcgcaa

SEQ ID NO: 4799 - DNA, 336 bp, Aspergillus oryzae
gaattcggcacgagggagatcttaccggagtggtagaccggcatgtcattctgaaacaacctactttctgacactatctccctgcagtcccatgattggctcctactccaaacactatacagctggcagtgtatacctgtcgaactacatgatatgtggttgtttgccatttacatgcaaacccaacagtacgctattgccgtggcgtcatcaacatcgcattgctctgtatctcgccgcatatgtctccgaggatctgtttgtctcatttacaacaggacagtggtcatatctttgcagtagccaagtctggttgaccactgcacaggattattt

SEQ ID NO: 4800 - DNA, 307 bp, Aspergillus oryzae
gaattcggcacgaggatatcatatcccctgacttcccctgcatcgaccttgcattccttgagtttgcttcaatagattgatagtcgttctgtcaagttccatagatcatatggataggcgttccgggattcccgctgtctcttacattatccttaggtcagcccaatgcgggtggatacctgaatattaaggctggactgatttgataaatccgccatgtgattggtcacttcgctccagactccgtcatggatagttgtaccataccaccttacatagtgcctctacaagcttgtatcaacattat

SEQ ID NO: 4801 - DNA, 317 bp, Aspergillus oryzae
gaattcggcacgagggccatttaccccagggaacttcatatatagtactttcattatacttggtttataggattgagttaattgaacggattgttagagcttggtacgatgtctgatcctaaggctttgcggtcggagattattgctaggggtcctttggacctaaggaggctagatggacgagattagtcaagactacataccgggatcctaccggtgtagaaaggacgtgggagtcagcggagcgcagacccgcccggcgaactgcgcaattgacggcgtggggatcgtgaccattctcaacaagtcgacgggtc

SEQ ID NO: 4802 - DNA, 504 bp, Aspergillus oryzae
gaattcggcacgaggcacagacggtcaaggcagaattgtcgacgcgaagaactgcatcgtcgtcatgacgtccaacctgggtgccgaattcctgtctcgtcccgccactaaggatggacggatcgatcctcaaactcgtgaattggtcatgggcgccctccgtgactacttccttcctgaattcctcaaccgtatctccagtacggtcatcttcaatcgcctcaccaagaaagaaattcgcaagatcgtcgacctccgtctggacgaagtcaaaagcgcttggagcaaaacggaaagaacgtcacgatcgaatgcacagaggaggtcaaagactacctcggcgacgcaggctattcgcccgcttatggcgctcggcctttggctcgcatcatcgagcgcgaagttctcaaccgtctcgctattcttatcctccgtggaagcatcgttgacggcgaggtggctcgtgtcatcatgcgcgatggtcgtatcgacgtcctgccgaac

SEQ ID NO: 4803 - DNA, 217 bp, Aspergillus oryzae
gaattcggcacgaggcagcgtgcggaggctttgaaggcatcggagggtgatgagggattggtggagattttgaaggacggggtgtgtgaagtacatgttagtgagagcgaccgggatccttacggtatcatggtcaggaaggtttaaggaacgtcagttgtagtgttattgtctgaaaattggttgatgtggtacgaccggtagaatcacattatat

SEQ ID NO: 4804 - DNA, 272 bp, Aspergillus oryzae
gaattcggcacgagggtctacggccgtgacagtgaggaggacctgcggcagatgatggagaggcaagaacaggagacagaccgacttgagaatgtccgtgcttgctgtgatggcaagcatgatgtcagctcactctcaaggacaagtcggtacagcccgcgtgtaaatcggcatcactctcatcactgagcctgtcgacgcccatcgtgaagatgcgttctttctcccaaggacctcgtctatgcatcgctcacatctctttcctttccacc

SEQ ID NO: 4805 - DNA, 187 bp, Aspergillus oryzae
gaattcggcacgaggcatcgttggaactcgattgggagcatcatcccacgccgaggtcagaggagattagggtgttcgctacgctgtttccgatggatggatgcaatctggttttcaagaggcggccttagtatggcacatcgcaatttgtgacttcgatactgctaagccgagggcgaggcacctg

SEQ ID NO: 4806 - DNA, 395 bp, Aspergillus oryzae
gaattcggcacgaggcaatatcaaacaccagcattagactagcactctttatgttccccaagttccttctcccaccaaccgtgttccgttctcgacaacgcaatgtggggtgctcgtcctctaccggaccctctaccataccctcgcccatggatgagagctgccagaaatacctgggtggccaggtatcatatattcaatgctctcgttgcgcaacggacctatgtttgacttctcagatcatcagcaaggggttcactggtcgccatggccgcgcgtatctcgtgtcggcggaacctatcgcctgtgccatcagtacaacgtgctcaccgacagaaacgctcccaaataccataatgcagaaacccgtatcgcgtcaactggtcacaggtgcc

SEQ ID NO: 4807 - DNA, 467 bp, Aspergillus oryzae
gaattcggcacgaggtccagtctaagactaccgtgggaatacctgtagggtcactgttttccgcgaggtataagagaaaagcatcttactctgcaacatcatatcttactccggagtagaagcgcagaacgtcatcaagcagcaatggctcctattcacgaacgcatccgcgaggacctccttatcaaagagcgcagtctgtggaccgctctcacctccgctgatcctggccccgagatcgagaaactgtccaactccgaagccaatttcctgtttcccaaaacacccatcctgactcttgacggtgagccctctctacaacagacactcaagcctccattccatcatttcgattcgttcgaattaaaggacgtccgagtcatcatcattgatctcatggcgggaacgttacctacaatatcaatgcctcgaaaggaaaggagcagtatcgggctacgggatcgaca

SEQ ID NO: 4808 - DNA, 360 bp, Aspergillus oryzae
gaattcggcacgagggaagaaaacaagcaaaaggcacaggctgtcgcccagcgcgcatctaacactaaggtccagacggcaacgacgcttcacgattccctcttccccgagatcaagcttcctggtggcatctccagcaaggccactgagtataaggagctcgcggagaggggagaacgctgggaatcacccatcttcagtatcggcgatgcacctgagtcctccaacatcccaaccccggctgatatcacccgcaagccacacaccaccgcccaaggccgtatatccgatggcaacgtgaccaacggtagcgcagcagctagcggcgcacgcacttccaacggttccaccaccatcggg

SEQ ID NO: 4809 - DNA, 404 bp, Aspergillus oryzae
gaattcggcacgaggactccctccaccagaccgcgtggtgtgatatatttgtctgtcttcgaccactgcaagatagacctgagtcgcagctatggctgttggaaagaacaagcgcttgtcgaagggcaagaagggtatcaagaagaggaccgttgatcctttctctaggaaggatgagtactctgtgaaggcaccgtccactttccagatcagagatgtgggaaagactttggtgaaccgcaccagtggtctcaagaatgcgaatgactcgctcaagggccggattttcgaggtttcccttgccgacttgcagaacgacgaagaccacgctttccgtaaggtcaagcttcgtgtggacgagatccaaggaaagaactgtttgaccaacttccacggcctcgact

SEQ ID NO: 4810 - DNA, 477 bp, Aspergillus oryzae
gaattcggcacgaggcctcgtgccgaattcggcacgagggcgctgcaagccaacaagtacgtcttcatcgagaagccaattgctttgactttgcaagatacggaccgaatcattgctgcggacgaagctgcaggtggggctagagtgttcattggttacatgaggagatatgctgcagctttcgtcgatgcagtcaaagaagttggaagcattgaacaaatacgttatgctcgtgtccgggatatcattgggccgaattctgtctttgtggcacaatccgggacgtatccaaagacatttaacgattatcgcgaggcggataccgaagcgctacgtacaaaaacacttgatgacatggagcaagctctccaagctgagcttggaattgccgtcacgaaagaaacacatatgatgtgggagatgctctctattcttggctcacatgatttgagtgccatgcgggagatcatgggtatg

SEQ ID NO: 4811 - DNA, 223 bp, Aspergillus oryzae
gaattcggcacgaggggagctcgacctgacccctatcctcacggtccgtttcgattcaattcatcttttcctctacttccaaatgacactcagcatcccgcttcgccgcagcgcggtcaccgctgcccgagtccagacctccaccacattcatctgttcgcaatgccgccatgcgactctccttcgacgccctaagcgtccctacaccttcactcagctcatc

SEQ ID NO: 4812 - DNA, 367 bp, Aspergillus oryzae
gaattcggcacgaggagacaagaaccccaagaaacaatacaacttccactacagaactctttgaaaagcgaccgctaaatcgaacaacatggccgataagtacaagccttccgaacacggcggtctccgcgaagacggacagcctgacaagcgcacgcaacagacccagttcgcgtacggcaaagttgacccgactgaggccggccaggaaggaggctccgtcggtggccacgcctctggcaagtcgagcggtggcagtggccaaggacaattcgcccacggcaaggttgatccgcatgaggcgggtaggaagggtggacagactctcggagatgattagaattatttatggggctgatatgtataa

SEQ ID NO: 4813 - DNA, 400 bp, Aspergillus oryzae
gaattcggcacgaggggaaaggagggacgggaggaagggaatagaattcggtgcctggaagtcgatcaggagaagacaaccgattctatgagagatttttttttatttcctcaattaaatggatttccccaattttgaaaaaaaaatcgaattaaaaaaagggagatcgacagggaggagatgaggacctgaggtcctccgcattttcctcccccgcattttcattagcttccattttgcctcacgtttccattgttggggatcacgtcgttccaatgattttttcggtcagcaatttcttggacagcctgcacccaatgcctggtcatatatatatacccccgaccacagccactttgctagtccctccagcttacaaaatcgtgtcatcatacttccc

SEQ ID NO: 4814 - DNA, 410 bp, Aspergillus oryzae
gaattcggcacgaggaaaattctcaattggatacttcccaagtcacacacaatggcatccagcgcagcaagtcagcggaccgaatcggtctcctcccacagctacaagaagtccctttccaataaggccgatccaaatgccgccctgagagaagagcagccgagtaagtatatcaatttgtctcagtgtgatggcgaactcgcggttgacctaggttagttgccaatgcgatcggtggtacatccttgttctctttgcgatccatgcagcatcgcgatgcaaagggcgagattatcaccgatccggatcgctccaacccgactcgcccccgactggaacgaccgctcgataccatccgtggcttcgaggcggccattgaagctcgtcggcgagagaatgccatgtaataa

SEQ ID NO: 4815 - DNA, 424 bp, Aspergillus oryzae
gaattcggcacgaggcatccacattcagagaccgctgtcgcgaaaataagacaaccataacagccgctcttcaaacaatcatcgctcgctcccttttcacccatctccctgaatcctccacgaaggtcagatgctccggcgcgatgtccaaccgccactggcttcccggccccatcacagaagattcaatgggtgtctttgtccaagaatacacggaagactactctcggaaagacctcagtgagacctcgttcccctggtccgtgaccgtgcggtctcgcgcgacaatcgaaagagaactcagtaaagagggcagggacacttctgcaaatctgcttaggtacgtaaacgattaccataatgagctctatttgtcaaaggtcgggcggccgaggtcgtccacctatgaggtgtcaaatgtcgg

SEQ ID NO: 4816 - DNA, 414 bp, Aspergillus oryzae
gaattcggcacgaggcttcttaggcgtaaagttatagcatgagttcatgcagcaatccagttcgtgggcctacctcgacctgtcatcgaggtgcacatggccttatttccgatagggttggggaaaaggtcggagaattggagcacgagcaaggagggtaaagattgagatcaattaatatctgcgtgcaccttgccttaccctctccagtgaactttgtcagtacgtatgtacagcacaaacaaacatatgaagcaaggcctgatgtttgcctcaccgcaattagttgggtgctgggtgaacttaacacctgacctcctgctgcatctggcgacggtattaaaaggtaggaaatgcctcggcgtatgtacggaggaggtactaaattaaatacgagagtaaaagcaaggcacc

SEQ ID NO: 4817 - DNA, 384 bp, Aspergillus oryzae
gaattcggcacgaggggagtagagtcgttaaaactcaccgaagccccgaagcccgctccgggcaagggcgaagtcctcgtcgagatccacgccgtgtcgctgaattaccgcgacatcgagggtacagttagcgcatccttctccatggttcaagaatcagagctaacgctgtgattcagtaactaatggcgagtacacccatcacaagtccgtcggacaagaagaccgcatagtgccatgctccgacatgtgcggcgtcatcacgcaggtcggcgatggtgtcagcgcttggaaagtcggcgatcgcgttctctctaccttcctccccgatcatcagactggccaagtgacggaaaaggaactgttgcgggggatgggtctgcc

SEQ ID NO: 4818 - DNA, 464 bp, Aspergillus oryzae
gaattcggcacgaggcccgccacaaggtcgatttgtttaatgttcgaaggagaaagctccataaatactctttacttaacgtcgttcttttcatctgtcgttttaccctatacattacccttctgttgcttttcccgggttaccggaatttgatagtcaatccaattgatcacacccaatacatacctcccccaaactcaaacgtcataacccaacggaatcccgactggaaacgtgagctcacccaagaaaaaaaaaattaacccagtcccccatcccacctccaaacaccaaagacactccctcgacaaccgaaaaacaatctatcatggccaacgattccacccccaataccgcagcggccaataccccgaccggcgaacctacacccactacccagctccggcccggcggtgcccggcccgagtctacatgaacgagaagatcgtcccgtatctcctgga

SEQ ID NO: 4819 - DNA, 543 bp, Aspergillus oryzae
gaattcggcacgaggttggacagctcgtctccggccggacagtacttgtcccgatagacgtcgccatggtaaactctgttttcactcagcaaacgtatgagcattttaataaaacggtgacgactattgtggacagagcatttgagctgtcactcttccacgattgcaaggtttacgtcctcgtagaacactctcgtgggagccttgtttttaactcagttgacgatcattcctggccattttcggacatgtcgctggatactggcaagttaccagtaacaaggattcatggcactgacttggctcacctccgattcaccgagtcagaaagaaaggaattcattcagctatggctatttttccattacctgctatgccgtctggatccccggcagccggtcgaggcatacttaccagacgtaaaagatcctgacgataactgtttggagaatcttgaacctgacaactaaagattggaaatcggtgtatcattggatattagtggttgactgtctgtattgcctcaatgtcatataatgatac

SEQ ID NO: 4820 - DNA, 505 bp, Aspergillus oryzae
gaattcggcacgaggccgcggcgagtggggcgtcgatgaggaaaaggtacgaactgtggttcagagccgtcgtggtgagagcagatacgtccaagaagaggtccgtcatcaggccgacctggtctggtatgtgatcaacgcactggacggacgcgtctttgtctgcggtagcggcaagggcatgggcgagggtgttgaggctgctctggttgacgtggctatggccaagggtaacctgaacgaagaggaggccaagttgttctgggacaacaagaaggaagctggccagtacattgctgaaacttggtgatggcacatatatctttttagagtacacttgagctgagttgaactcggctgttttatacgttgtttgggtctggtatattaggttcatttgcatgcacctgggatttattgttggatttatcgggtttcgtatatttgtctgcttctttgtttgcatgtcattagcgggtggtttctggtttttacccggtgagcc

SEQ ID NO: 4821 - DNA, 333 bp, Aspergillus oryzae
ggtcacccagtacaaggctggcaaggcctccctgtacgcccagggtaagcgtcgttatgaccggaagcagagcggttatggtggtcagaccaagcccgtcttccacaagaaggccaagactaccaagaagatcgtcttgcgtcttgagtgcactgcttgcaagcagaagaagcagctctctctgaagcgttgcaagcacttcgagcttggtggtgacaagaagactaagggtgctgctcttgttttctaaatttgcgatttccttgttcggctctgggtttcctgcattgcacaggccgctacttccgcggcggggcacatgacattgggcaa

SEQ ID NO: 4822 - DNA, 331 bp, Aspergillus oryzae
ggaccagtacacgctggcctagttggtgtgatcgtgtgttgtatttggaaactttgcctggtttgggcgaggaagcgcgggttaggcccttaaagtataactctctgccgctgtttccgacgtcagatcatcgcgctgtcgcgctgtcggcttccgttcctgtgtcgtcaaggcctccagcggatgcaacgcagtcagcaattccgtttcggattgacccggaatgggcgagtaaacgagacgccgcacggagaaaagagctcgtagtaggctgcctagcatatttgggcttgacctgggagggaaatggtcttgttggtggcctcggtaa

SEQ ID NO: 4823 - DNA, 326 bp, Aspergillus oryzae
ttggtcagattatctctgacttcatccttctgtcaagcgccagtctcactccgactgggcaggtcagttccagtttacaggtttccctgtcgaactcgcctgtgcactccgttctttaaccaacgcttgcccatttactcgtatccaagcaccatgagctcctcagaggacgataccccacttgtgaaagcaaacggtcgatctactgttacccccaacgtgaccatgggcgatgcgacagagacaaacggcgatgtcaaccctggcatctcaaaccgcttcggacccgtgcagaaggacaatgatgttcaagatgacggatgcgg

SEQ ID NO: 4824 - DNA, 347 bp, Aspergillus oryzae
gttattgggatgccgggggattttgtctgtcgggatttgccgtttagtacggaggttgggaagagtcaggagatgattcaggtgcccgagggtcatgtgtacgtgggaggtgataaccttccctggtctagggactcgagaaactatggacccatacctatgggcttgatcaatggaaagatcattgcccgtgtttggccgctctccaaagcgcaatgggtccagaatacgatgcagccagctcagctcgacgactaggtgtatcctttacaagcatggtttatggcggagtctggagttgtgggatatttgtgcatattcatacagttcgattgtacagtacagat

SEQ ID NO: 4825 - DNA, 509 bp, Aspergillus oryzae
aaggctctgcattatatattcggagcttgttgcagccatcccttgagtgcctgatactgtccttggcacatcttatcttttgtttaccgcttcgagcttccgccacaaccatacgtcgatagcatcccctgaagatatttccattgtcaattgttgcattggggtattagtttcaggcaaaatgactctctactacagccttgttttttgtcttctcgtgttcgagatggtgatctttatgggactcattgtccctctgcctttcactatcaagcggaagctgttcaccttcatttctgaaagtccgataatagcaaaactgcaatatggaatgaagattacattcattttcattttaatcctcttcattgacagcgtgaaccgggtgtaccgcgtccagctggaggtgactaatttctctagggagaacatgggagcggctgccctcggcactgaccgcatggaagtccaggcccggaagttctactctcaacgtaacatgtacctct

SEQ ID NO: 4826 - DNA, 473 bp, Aspergillus oryzae
ctggttcagcagctacatcaaacgtgctagtctagcaccttgaacttggaaacaaggatgccgctgcggacgactttgaactcgctatctcccacaacaaggacgacgctgatatctactaccaccgcgcccagcttcacttcatcctcggcgaatttgccgaagccgctaaggactaccagaagtccatcgaccttgaccgtaccttcatctactctcacatccagctgggtgtaacacaatacaagatgggatctgtcgcatccgccatggccactttcagaagatccgtgaagaacttcgaggatgtgccggatgtctacaactactatggtgaacttctccttgaccagcagaatttctccgaggccattgagaagttcgataaggccgtggagatggagaagcagagcaagcccatgggaattaacgttctgcccctcatcaacaaggcgctcgctctgttccagtgg

SEQ ID NO: 4827 - DNA, 94 bp, Aspergillus oryzae
taccccttgcctataggaatctaacctgtactgtgtattttgcggcggtggttatattattctaataacttttatggaacaagaattacggctg

SEQ ID NO: 4828 - DNA, 328 bp, Aspergillus oryzae
gacagcactgaccttatccgataaccagaagagaattgcagagaaaagggtcaaagaagccggactggaggaacgtgttcgaatccttcttcaagattaccgatctgcaactggacctgaaactaatggagggtactatgatcgcgtaatttcgatcgggatgttcgagcacgtcggtgcagaatacctagatgagtatttccgcgtcatcagctctctacttcatcccggccatggtgttatggtcatcgatggaattaccatgacgcacaagatgcgccagtccaaatccagtgtaccgacctttatcgaccgatacatcttcccc

SEQ ID NO: 4829 - DNA, 229 bp, Aspergillus oryzae
cacggccagaggccaagaagctcgggtttgccttcctctttttgctggtttcgtcatccatcaccatgtcaattcccttctctatcgggaagatcatggatgctggcgacaaagtctgctaccgaagggggcggtgaactcttcggcctcagcctaccaatgttctatggagctttggccggagtcctcaccttgggcgctgctgcaaactatggtcgcatcattattc

SEQ ID NO: 4830 - DNA, 344 bp, Aspergillus oryzae
caggcgggagctggtcggtcgcaagaatcgtgctgtcctccaccaccaagtgaataagtagactcgaggctattcacacagcaagatgaagtttatgaatcatggagctcgcgctgatcgcgccgagcactctggctcgaccccagtgtacagctccacgcagaagcagctccccatgttgcatctgaaggacaccgcgcggaacaatgtcattgccgtcatcggagaattcgtcggaaccttcttgttcttgtttttctcgttcgcgggcacccaggtgtccaatacgcccaagccggtggacggtgcgccaccgaatacagcaaacttgctctattcaagcc

SEQ ID NO: 4831 - DNA, 338 bp, Aspergillus oryzae
gtgtctggaatgagcagtcgtcgcgtgagattatggctgttccacggctgtccgtcggcaaactcgaagaggcttatcgaaggtccagtcgccggcttatcattgttgattacgagggtaccctggcctcttggggttccccaaaaagcatcattgtcactacgccgcagcgagcgattacgacgctgacggagctaactgaggatcctaggaatatcgtatttgtcatgagctctagaatgccagaggagatggagcgattgttccggatggtggcgggcttaggcctcattgcggagaacggatgcttcgtgcgagagccgaagacggacgagtgg

SEQ ID NO: 4832 - DNA, 322 bp, Aspergillus oryzae
gaagctcgaacttcacgccgatgccctctttctcgctgatggccttgtccccactcccgctgcgcagcagttgaaaggcgagattgcgcatatccatcgcttgaaggatttctcactgcatgtgactttggctcctgctgactgcaagaaagtgattgaagcaggttgggggcaacggcatagattatctggggttcaggctccgaaggcactttttggaggaaaggtcatctcgcttccgtcggagtatgttttaatttatgccccgcgcaccaaacaagaggctgtgtttgtggtgggagatcattgctgctagtgtgaa

SEQ ID NO: 4833 - DNA, 325 bp, Aspergillus oryzae
catacttggcatacattcaagtcactgccttatcaatgaactcttcaaaactctgaaatcaacatcgacttcttctgagaacctcagattctatccacatacccgtgatgaaaatactactatcagtaggctaatactgccagatgagatattttcaacttgctctccttgctctccttgctccttacttacatcaatcagcttgacttagcagctagcagtagggctgagcgcggcgtgatggaagggccctatttctactatcccagtattgtgcaagcagcacagctgaagttttcttctggccggtgaggcctaattccaa

SEQ ID NO: 4834 - DNA, 331 bp, Aspergillus oryzae
gctatcgacatatgactaagctcgcctctgtaccatatcatttagctagccatctagacttgcatttaccctaaaatggctctgaatattgcacagcggcgcattagcgttgtgcgaatcccattttctcctggccgaacttttcttcgtcgcaatctcattcccgccccgcacgccaactcaggccctttgctggaacgacgggcagaccgcgaactgccttctgtaaacaaggaccgacggtggatgcggaccttacccatatttgccattgctgtcggagctgcgatgctagggatattcaactaccagaagtcttcttcaagcgtgg

SEQ ID NO: 4835 - DNA, 322 bp, Aspergillus oryzae
ggttacatcggaccacgtgtgcagggtaccctctggtcgaagttatttatgattttttttccttgaaaagtatattatgattaattgtcttccttgaccgtgtttctcagcattactactacgattacccacctcggcatagcccttgaattgagtggcgttgctgccaagacggcttagtcattagtggaactggatgccttgttgttacctgaaaaattcggcaccccccgttttcctgaggaacctacacccttcagtgtgccactgagaagatcgacgacatcaacgactctttttttttatagtgcactcgtctttt

SEQ ID NO: 4836 - DNA, 323 bp, Aspergillus oryzae
gtggtgtcaaggctgccagaaactctgccattatgtgcgctgttttcctggctgtcattgaaggtgtcggtattggtttccagagaatgatggcagacaacacaaaactagagctccctcctgcccctccatctggcgacaaggtcgctgcttaaatcaacccccagctacgatccctccttcccgaatccgatctatatgctatattattatcacgtatctctcttctcaggtgttgggtgtggtcatcatttctgggggcatactatagaggttgctatttctattgtgcttctatccctgctcttaatcctcttgtattg

SEQ ID NO: 4837 - DNA, 319 bp, Aspergillus oryzae
cctcgtgccggtcaatatctcaccgcgactgtgtaaatactagcaaaatggcgacccgggctccttttgtcgttcctgcactcaagaaacacaccgcaaccgtgatcatggctcatggtctgggcgacagtggtgctggatggatgggccttgctcagaactggcgccgtagaggcttgttcgaagaagtaacttttatttttcccaatgcgcccatgattcctatcacggtgaattttggtatgtcaatgcctggatggtacgacctttccaagctcggccgtgatctggattttgaagaagctatccgcagccagga

SEQ ID NO: 4838 - DNA, 337 bp, Aspergillus oryzae
cggcacgaggctggacgagggtccgtacttcgtccgaggactcgccgtccgcgctgactcgcgaatcacttgccaaggctaccgttgaatgaggtaggggcgtcatccccacgaatgcgcgcgacacgggacgagttcacgagctccaggcaaagtgatgctatggtgcgggacaaagccatgggagtcagggacatcagaccgggcctcctcccatgccgtccccctctggtttgctggtggggtgacgctatagcagctatcacttttcgagatccagacaccattcgttagttccatgtccgtacagcaccgggctagcaatggctcgtggggg

SEQ ID NO: 4839 - DNA, 413 bp, Aspergillus oryzae
ccgcttcatcgtccaggacttcaacagccttcctctcccgttcgaagatgagacctttgacgcattctatcagatccaggcattcagtctgtgcaaagatttgcccgctctgtttcgcgagatcttccgtgtactcaagccgggagcgagattctctatgctggactgggtcagtctgcctgactatgatccctcaaaccctgagcatgtccagctcatgcgccgtgtaaagcctctcattggggcggtgggcacccctactccgaagattctagagaacgctctcacagatgcaggattcacggtaactcgctccgacaacgcgagtgtcggtggactgcaagccccgttgatcgcaaaggttgacctctacttccggtccatgcgacagcttatactgggtctggtcaaaa

SEQ ID NO: 4840 - DNA, 414 bp, Aspergillus oryzae
gggcaacatcctcaagggtgttgagaaggacccgctaaaccagtggacaggtcaatcaatcataggttctaacactctcggagtgcaatacgctgtcattggacctcagaaaatgttcgaaaaccccgaactgaggattctcccttactctttcctcgtgggagccgtcatccccccaatactgtacatactccaccgctgcttcccacgattgcgggttgacttgtggaacgtcacaatctttttctctggtctgtcggtcttctacgggaatatcagcacaggctatacttcggccatcatcggaggatatgtggttatgtactgggcgtatcggcgtcggtttgagacctggaaacggtacagctacatggttgccgccgccttcgatgccggcttcaacttgaacatgtt

SEQ ID NO: 4841 - DNA, 465 bp, Aspergillus oryzae
caggatggaggattcacaccccgccgaggcagagcaacacgatctgctactcgtggtcgatgcaacagcttccatgagtagcttcttggcgtcactcagagcatcccttcgtcagatagtatccatgtcggtgctcacccgctgtttctcgcgaattggattattagcctatcgtgactacagcgccccgaacctgctgcaatggtctggatggcacgatacttcgcagaatgcgacgggtacccagcccgacctactcgagattgctgcgtctcttcgaacagaaggaaactatgacacccccgaagcggcaaagacaggcctcgcgaaagcctacgaagtcatgcgtccggatgccaaaacagtgattcttttctatacggacgccccccctcatatggctggcaatgctcaactgccagatctgtggcgaatagaggataatggtataagcgaacgcgaagc

SEQ ID NO: 4842 - DNA, 432 bp, Aspergillus oryzae
cctcagggtcgaaaaccttgtctccaagtcccccctccgatctctctacccattcaggaatggagagcagtctttcgggtaatattatacccgaatacaaaggggaggcagcgcatactatcccggaagcagtgtgagaggctcttctgcgacacattgtctgtgattttccttggtgaggggattctctctggacaagagtcgcttggggcaggtgcgtatcaagttcaaccgaataattcaggttacgagcatagccgaattcaagagtgggttgaggtgttggactatacaagtgattgtatataccgaggatttgtgaccagttcagatgacgagcgtgtcctattcatattctttagtgaatgtgcactgggccaaggtctcaagactggattaattgccctttttgagttagcaagtctctctgaa

SEQ ID NO: 4843 - DNA, 456 bp, Aspergillus oryzae
acactgagaaccacatactacaatactctgtctcaccttctgtgaactattttaaatctcattttttgaatcgcgacaccacacatcagcaaaaatggcccacaacccgaaccccggaaacttcgccaaccgcccccatgacgaggtcgaagacatcgcccgcaagggaggccaatcgagccaccaaggtggtttcgccagcacggacgaggataagcagagagacatcgcctcgaagggcggtcacgcttcgtcaggcagcttccgtcctggagaccctcgggctagggaggctggtcacaagggtggacttgcctctggtggaagcttcgagcctggggatgagagagctagggaggctggccacaagggtggaaaggctactggacacccggaggagtaaatatctacgtgctcctgctttcgagggtgaaacttgtacaataggaaacgact

SEQ ID NO: 4844 - DNA, 426 bp, Aspergillus oryzae
cggcacgaggtccccagcctcggggccttctcgagcacagccagcttcgttccgactagtgtcggagtcagttgcaatgggggaacatctatctgaagaagtgcccacatcggctgtcgagaccaacacatctaggcggcccatgagtcataatccaaccgtggctagttattcaccacgcccttctccctccgctccgaaggtgagacggcggtctagttccccgagagaacaccacgcctcggcatctaggaagagtcgtcgggcaaccacggcagactcggcagctagtcctacgattatgacatgggttatcagcgctggtgtcgtggttctcttctcggcaatcagcttttcagcaggttatgtgattggccgtgaggtcggaaggatggaggcaagcacaggagtcggatccgtcatggg

SEQ ID NO: 4845 - DNA, 454 bp, Aspergillus oryzae
cgctgttgttagtcacagaaccttgctacaatctggttgcctttcccaatttcatttaaataatttctggttggattttgtccatatcggcagccaccaaaatggatttcgcggcgttgatgtccaaggagatctccaaagctaaaagcggcggatcatcgtcatcagacaaaaaagatacatcgaaccccccagagaagaaatatgttcgtcgcagtgaattagaagccgcttggattgccgcctacaatgaggagcaggagcgggcgcaacgtgaacgagaagagcgcatggctcagaagcgcaaactggatgaggaggaggccgaacggcgccaggagcgagaagagaaaaagcgacggctagcggaagagtcacggaaaaagagggaagaagaagaggcggcccaggagcgagagcgacggaaagcggttgggattgcccgagttgcccc

SEQ ID NO: 4846 - DNA, 453 bp, Aspergillus oryzae
cggcacgaggtttaaaatactcgtgaccactaccaagactggtttctgtctatcccccactaccatcgaacatatcggcgtttgctattagatctagaacttcacaacttcgctacacctataacacacgactagtatactagtaccctgcactgcaagatggctatcgccgttcggttcgtccgcccaactatccgccatttctctgttcgccgtccgcagccagacactcgcacctctcgattcgtcaccacttcgtgtctcttctcggcggtggtgctaccatttgttcctccagccctggagagctctcgcgctaaaaatacagacggtcccaattgcaataagccacacccgccgctctgtttccatgcccgttaatatgtcgtctcggttaccatccccgaagggggaatctgtcatcggtacctgacatgcatcgggacattttcc

SEQ ID NO: 4847 - DNA, 355 bp, Aspergillus oryzae
cggcacgaggcgactgagcggtcgctttaaaagcctctctctctcactctcttatttttttttttttctaaaaaaaaaaaatcacattaccaacaaaatggctcttaagagaattaacaaggaactctctgacctcggccgtgatcctccctcctcctgctccgctggacctgtaggtgaagacttgttccactggcaagctactattatgggtcctggtgactctccatactcgggaggcgttttcttcctagcaatccacttccctaccgactacccattcaagccgcctaaggtcaacttcaccacccgtatctaccaccccaacatcaactcaaaatggcagtatctgtct

SEQ ID NO: 4848 - DNA, 412 bp, Aspergillus oryzae
cgccgactccatcaacagccgtctggctttggtgatgaagtctggaaaggtcacccttggctacaagtcgaccatcaagacccttcgttccggcaaggccaagctggtcatcatcgctgccaacactcctcctctccgcaagagtgagctcgagtactacgctatgctcgccaaggcccctgttcaccacttctctggtaacaacatcgagctcggcactgcttgcggtaagctcttccgcaccagcaccatggctgtcctcgatgccggtgactccgacatcctcaccagccagtaagtgtaaagcacggacaatgtcttcatgttatgtctggacgatatacaagccttggaaagcgatgaggcacgtgatagataatgacaagaaactttgcacttattaaccattttg

SEQ ID NO: 4849 - DNA, 440 bp, Aspergillus oryzae
cactcgtcccgactttttgctcgaccatcccgacttacgtccccaatcaccgcccaccatgcctcgtgaaatctccgacatcaagcagttcattgagatctgccgccgcaaggatgcctcctctgcccgcatcaagcgcaaccgcaagacccagcaggtcaagttcaaggtccgctgccagcgcttcgtctacacccttgccctgaaggactccgacaaggccgacaagctcaagcagagcttgcccccagccctcaaggtcgttgatgtctccaagggcgagaagaagaaggctctgtaaataccttcaatgatttgaagtagggagaggtgggtctcggaggacggttgccgaagcataagtcgactgtcgaatgggatttggcattggcatggatgcttgtgtgggccggcactgggatgaatcgatctgacctgtt

SEQ ID NO: 4850 - DNA, 492 bp, Aspergillus oryzae
gcaattgccatccacaatggcctctgctcgttccctgatgcggttgggcaccggccgctcactggcttcggccgcgcggtcgtcccggatgtgccgtcctttctcgacgacccctctgctgaaggagtcgatccccgagcctcctaacatgcgccaggctcagcgtcctcctgagggtgccctccgtgcccccatcgtcaaccctgccgacaagtaccaggacaaggccgatgctctgcaccagtacggccagtacgtcatgtcctgtctgcccaaatacgtccaacagttcaccgtatggaaggacgaactggtcatttacgttcccccctccggcgttgtcccattgatgagcttcctcaagtaccacaccgccgccgaattcacccagatctccgatatcacggccgtcgacttccccacgaaggatcagcgttttgaggttgtctacaacttgctgagtgtccgtcacaactcccgtattcgtgtgaa

SEQ ID NO: 4851 - DNA, 460 bp, Aspergillus oryzae
tccaatgctgtcgcggagaaattccaaccagggaccaagtggatcaacaaaacgttctgagacgccctacatcactcactagttatcactattgattaggcatcgaaatttcggcgaaacagataagagagaagaaggcaaaaaccatggtctgaatcacgccaatcatcttcactggtcggcccctgagacaagtgatgcaacaaccaagatctacaaccatggtacaacgcgctttgcgacttgactgaacatcgcatactatatccgtcatccactccggatcaacgaagtagatcgggatttaatcgatgtctcactagtattagtccggtgcggaatgatacacttcgtgcgcaacaagtgcaaagtgtggaatcaacgctccacaactggtacaggctacacacggcatgtcctcgtcctcatcactttcctcccaggaatcaccaccggtttt

SEQ ID NO: 4852 - DNA, 502 bp, Aspergillus oryzae
cagccagacaacaagatgctttctctagtcctttcagctgaactcacaggagtcaccgaccttcgccctcaagatactcctgaggatccctactactacactttcaaggtgcaatgcacgtcctgtcgggagacacacccaaactgggtcagcttcaaccgttttgagcaacatgaaatccctggaagccgcggagaggcgaactttgtctggaaatgcaagctttgccaaaaaacccattccgcttctattgtcgcaggtcccaatgtgtacgaagcggacgagaagcgcaagggccggaaagtgatcgacattgactgccgcggtcttgaatttactgattttaaagctgatggcgaatggcaggcgaagggcaccgagtcttccactccctttacggccatcgacctgtctgagggcgagtggtatgactatgatgagaaagctggagatgaagtcgccattaaggaaatcacctgggaggtgggaagaggttgagagg

SEQ ID NO: 4853 - DNA, 258 bp, Aspergillus oryzae
cggcacgaggctcagtcatataacgcgacattcctcttcccgattgccgtggggatggtcggctaccgaaaagagatatagaatttcatttttcaaagccaactagtgcgggtatgcgggttgcttattgtggtgaaaaagactttttcttcctctttgccctccgatgtttctgcatgcgcttttcgccgtgtttttatacctttcttgcctagtttcatgactttagattgcacaaatactacgacgtaaatgaag

SEQ ID NO: 4854 - DNA, 435 bp, Aspergillus oryzae
gcaaaaacagattcgtatctgaacgtaacccgacgattgtcacattcccgtcaccccgctctctcgacatgtcgccctacgtagaaccgaacccggacatttggcctccgggcgaaccgatcctctacgacctcgtcgccaatattatcctggatccaactgtagctgtccctggtgccactgacgaggcagccgcagataagggtgttaacgcagcatctggggcatcgtcgagcggcgctggtgcgggcagcgagaaggtttcctggatggtccagcttcacgataaagctatgtctgcagagaataatcgacaacatagcgagcgcgctggtgaacagcaagggccggagtggcttgagatccaggatctgtttgtcaagaaagcagaaacagaaaccctattcacccgagaaggatatcttatggtctggg

SEQ ID NO: 4855 - DNA, 456 bp, Aspergillus oryzae
ggagaagcccgcgaagcaggccaacggcgaggaaagcttgagtaagaagcagcagaagaagcttaagaagaacaacggtgatgcagctgctgttgagcagaagaaggaggccaaggaaggaaaggaggccaagaaggtccagttcgctaagaaccttgagcagggccctaccccctccggccaggacaagaagcctgccgagcagaccaccggcacccttggtgtcaaggaggttaagggcgtcaagattgatgacaagaagcttggaaagggacctgccgccaaggccggcaacactgttgccatgagatacattggaaagctcgaggacggcaaggtctttgatgccaacaagaagggcaagcctttcaccttcaagctcggcaagggtgaagtaatcaagggctgggatattggcgttgctggtatggccgttggtggtgaagcgccgcattt

SEQ ID NO: 4856 - DNA, 451 bp, Aspergillus oryzae
cggcacgaggcttgctacaataatgacaaccttccacctttacggactttacagcgcatcgcaaagtgtcatcgacagctgagggtctatctttcctcccccggcgccttgccagaagtcgcgcttacgtgtagtgtgttgttttatgtgttcgaggctctcattggcaatgctcagcaagcgttaaaacatcttgaccttagcctgacgctcttgcagcgatgtcagaaggattcctctccatcgatgtccaaacccgatgatatcgttccccatctggcagccttgctgtcatgcctggatgtgcaagctagtatctacgatcaacaacgcggacctcctagactcatcttgacttccccgagcgagacatgcggcacacaaagcattgtacccgaggcttttgtcgacgttgctcagagcgaggctgcacttctaaagcttcaaaatt

SEQ ID NO: 4857 - DNA, 432 bp, Aspergillus oryzae
tgcaatatcaaaacagatagacgatgggtccttgagttttaggcttcacaagagagttaagcggctattctccaccaggagattttcgctgggagcttctcccgcttcgattgtggaccttgaccactagacaaagatgggatcgattgcatggtgattgttccgactatctgatctgaccacaaaactgagcacgtactttggggacagcatatgaaacggtcgatcaaaacatcccgtatatttttttttgttctctctaagcgatgatgaataatttcaatttgtacaaaacgaagaattccgcctcccggtatttccggaagaagcgttccgtgaatttgtcacaaatgtggcagaaaatctaaaatagaaaagacgagaaggaagagtggttgaaagattggcgattaaattcgctcgtggtcacgg

SEQ ID NO: 4858 - DNA, 426 bp, Aspergillus oryzae
accgactcctcccatccgcctatttccgccccggagacggcatcacaggcagccgcacagaagaactcccaccactcaacccacccctcccatccagccgctgcgatgagcaacacatcacatacaacctcctagacacagtcccgcggtggaacgcagccaacctcccatccgcaaccttctcatcccccctcctatccatctccaccgaccacaaaatcctcgccctctacgaaccaagcggcaactactcccctgccatcgtctccggaggctcgttatacctatactgtcttgaaaactgccaccccgtataccaaccgggtccacagagattcaaacagccaacccagaagacctcccttccccatcagcgggctactggccccgaggacaaatccagcgtcgatgccaggtatccgcccc

SEQ ID NO: 4859 - DNA, 453 bp, Aspergillus oryzae
cttcatattcccatactacaagatgtccgcagtaaaagcagcccgctacggcaaggacaatgtccgcgtctacaaggttcacaaggacgagaagaccggtgtccagacggtgtacgagatgaccgtctgtgtgcttctggagggtgagattgagacctcttacaccaaggccgacaacagcgtcattgtcgcaaccgactccattaagaacaccatttacatcaccgccaagcagaaccccgttactcctcccgagctgttcggctccatcctgggcacacacttcattgagaagtacaaccacatccatgccgctcacgtcaacattgtctgccaccgctggacccggatggacattgacggcaagccacaccctcactccttcatccgcgacagcgaggagaagcggaatgtgcaggtggacgtggtcgagggcaagggcatcgatatcaa

SEQ ID NO: 4860 - DNA, 464 bp, Aspergillus oryzae
tcaatttctttaatatcacgcgcaatgaaatcacctgcacgtttttgcaataaccgtttttgttttcgcaaacgaagaagcttcgccaaaataacctcctcctcctcctcaatagtattctgggctttcacgagccgtttccactcagcatcagaaaaggaaggttcggacattttgcaagaggcaccgttcgctttcacacactcgctacaacgaccagaattttcggatttaatacaagaacgatgaaggcggatacaacgttcgcaagggaataccgcctgaaacccctcgtcttcgattcgctggtaaagcttggatttacggacagaactggaaggcatggtcaggacatgggtaaaagaaaaagttgaggatgggcatctctcacctgggcaagaccgcaactttatgctttcgaggacgaaagcctgaaagaggggggatgatgttacagacccttg

SEQ ID NO: 4861 - DNA, 463 bp, Aspergillus oryzae
cggcacgaggcaaggatcttctcaaggaacctcataacgaacccagttacagctgccatgcttcctttatcagcgcgcgcccttccgggtgccctccatgcacgaccacgcttggtctcatcgattcctcgaatccaactagttgcacatctgtcaactacccccaatcaatcggccacagcgcttgagcacaaaggacattcgggtcagccgctgactgcttctggaaagatacggaaggaggtacctctaccgagccaggagaagaaggagggtgcgatgcaatatgtgctgactaccttggaccaagttgcgaattgggcacgtcagagctctctttggcctatgacttttggtcttgcctgctgcgctgtcgagatgatgcatctgtctaccccgagatatgatcaagaccgcctagggattatctttcgagcctctcctcgccagtcagatgttatga

SEQ ID NO: 4862 - DNA, 450 bp, Aspergillus oryzae
actttacagcaatcaagacactaaacaagtggcatgcagcgacattggaatccgctaagcggcgccgccaggcagcttacgcgaagacacgaagaaagctcaagatgaaccttgctgcaaacgctctcgaaaactggcgtgcgagggcccatgatgtattcgacatggatcagcaggccttgcaatttagtcgaagaaaatcactgagcattgcgtctgaactcctgcatcgatggcatgagcaaactgcaaagcgaaatcaagataaccacgaagctgaagtctatcattcgcggagagtcgcttacgaccaattgatacgtttggcagaggccttgctggaatgccaccgtttaaatcagcaagcagacagtatgtatcgcgtacatgtcttgggacaggcgaacgtttgcctgcgcaggcttagtctccgtattttccaaatcagaa

SEQ ID NO: 4863 - DNA, 445 bp, Aspergillus oryzae
gcaagcgcgttccctctccctgtattcacgggactcttggctggtgtggtagttggttatatcatttaccggggcgggaatcaaacctcacttcagatattcatggtcatctcgacatgtctgctctacttggtcgctgctggacttttgtcccgaggcgtctggttcttggagaacaacacttggagcaacctcatcggtggcgatgcctcagaaacgggagctggtcctggatcatatgacatccggcaaagcgtatggcatgtgaattgctgcagtcctttggtgaatggtggcgggggatggggaatcttcaatgctatacttggatggcaaaactctgccacctatggttcggtcatctcatataacctctactggcttgttgttattgtgtggttcgtgatgatgcgatatcgcgaacagcaggggccgttggctattt

SEQ ID NO: 4864 - DNA, 452 bp, Aspergillus oryzae
cgcatcacctcaattcgtcaaaatggctgacttccagagcatcgcttagcagttcgttgagttctactacaagaccttcgatgaaaaccgcgggcagctgtctggtctctaccgtgaccagtctatgctcactttcgagaccagctccgttcaaggcgttcgcgatatcaccgagaagttgacttctcttcccttccagaaggtcgttcaccaggtcagcaccctcgacgcccagccttctaatgaggctggtggtattcttgtcatggtgactggcgctctgcttgtcgacgatcagcaaaaccccatgaactacacccagactttccagctcttgcctgacggagctggaagctacttcgtcttcaacgacatcttccgtctggtttacggtagctaaatgcaagatcgtggaggccgatgttgtatgttaggttctgggcggggatcca

SEQ ID NO: 4865 - DNA, 437 bp, Aspergillus oryzae
actaagtacagtgtgatatcagacttacactccgcatacgtccttattaggcacccttgtttcgtacctgcatctttgtcctcaccattcacaccgctactcgagactcacacattacactgtcatcatgcctgtcgtctcacgtctcgtgtcgattgttctccgcgtggtagaaatcatctgcggtgcgatcgtcgccggtatcatcggttactaccttggttcgttggacgaccttgaggcttggcctcaagcacgatggatctataccgaagtaattgccggtttatccattctactgggcctgatatggctgatacctttctcatccggcttcttttcgtggccctttgatgtcattatctctctcgcttggtttgctgccttcggtatcctcgttgacgctatccacaaatttaactgcggaagtatctggg

SEQ ID NO: 4866 - DNA, 476 bp, Aspergillus oryzae
gacgcgaatggtggcgctgacggcgctttcactgttcaggactatggtattgaggttgatttcgactctctgggcgaaacactcaaggaggagtctgacgagaagcttgaagaggagttactagataaaattcggtctttgaatagtgaacttgacaaaatggctcccaatacccgtgcaatggaacggctggagagtgtcgagaacaaactccgaagcacagagaaagactttgatgaatcacgaaaacacgcccgaaagaccaaagaggacttcgaggaagtgatgcgccaacgatcagagctgttcaacaaggcgttcactcacatatcggagcaaatccagcccatctatcgcgacttgacaaagagtagcaactatccattaggtggacaagcgtatctggacatcgaggattcagatgagccatatcttgatggtatcaagtaccatgccatgccaccgcttaagcgttt

SEQ ID NO: 4867 - DNA, 448 bp, Aspergillus oryzae
ggaagaggcccatgcgaaggcacatccaacccagaaagggcggatcaccggcgcctaagagcccgacagtaatcgaggcattcacccgccgttgagcagagccctttccaggatcagccaaacccccagacaaaccgacgcgcatcggcgcgcttgtcgtctcgactcgaggccgacgagggcaccagatctaatcgaagcagccgaatcccacccgagcgaacggaaagtccattttccgacgccaacgaggtgaaatgagtttcgtgcatgcttttctctcttgttttccgtttcagtctgggtcctggttggcgactattggcgtacgagcatgtttgggtcaattgaccatgttatagaagctatgttatcttacttttcgtgtatctatgatccgctatgcttttggatcgattataggtctatcaatcattcaggaactact

SEQ ID NO: 4868 - DNA, 446 bp, Aspergillus oryzae
gtcgtggcattatcgactggagaaaaccgagactcagaaactaggccaggataccgtggcgatcaacgaggcacggcgtgaagtactcgagaggcgccgacaggcaagaatccgagggcattgagactgccggctctgtccaggagacatctggccctaaaccagtacattttgtcatcaaagcagacgtcggcggatctgcagaggctgtcttaaactcggtcactgcgattggcaacaacgaagtctttgctaatgtgctccgttccgaggtcggtccaatcagtgagtttgatattgagcatgcagcttcagcaaatggtcatatcgtctcgttcaatatgcctatcgaccctgccatgtctcgtatggcagaagttcgaggggtcaaaattatggatcataacgttatctacaaactcattgacgatgtcaaagcaatcttt

SEQ ID NO: 4869 - DNA, 457 bp, Aspergillus oryzae
gggccggcgtctggactctaatcaccatcccatgggtccaaagtgatcttcgtcgcgagaagaaagcatgggctgaaaaccgcggccaaggaggcattccttacacggatgatattagcgcgccggctgatcggactcggctcgagtcgatacacgaacatatgccgaacttatggccttggggccgcgagaaaaataaggaaaagccctctacgcagtctaccccgtctgacggccattcaaacgtatgattcatttttttcgcgtcacagaagggcgcaaattagcctcgacctttcctttctctttgcgcgcttgcaagctccggagtggtaacaagcacgcctttacatgaactcagcagttcattcaaaaattaggttggtccaatcacgccatgaactctgatatgtcctcaacggaaactgcggcagctttccagttgtggacagcaagg

SEQ ID NO: 4870 - DNA, 439 bp, Aspergillus oryzae
ccgctgtcttcacggtgttaaatcggagctatattcaggcaccggaaaagactaaatttgtttttctgtctaaagatccgaggaaagggatcaatttccaataattaaacacataatgggcgccggtagctccaagcctgacgcttcggcgggctcgaaacatgttttttcgagcagtggccccgtcgagttctcatctaacctcgttgaccacctccaatccaacaccgagacggacgcctcccgtgcaaagagcatcgaactccagatccaggcccgcgtagcccaagagctcgaacgtctccgtcaacgcgagcagcagaccattgctgagatcgagaagcgcattgcggaatccaaagacactgctccctcgtcgttctcttccacaccaaacatcagctaccctcctggctcgctgaacctggatgctccccgg

SEQ ID NO: 4871 - DNA, 326 bp, Aspergillus oryzae
tggctttcgaggacgattacaaactggtgtccggcgtcgagaatgacgaatgtttgaccctccccggcacaactggtatccgggactttgttgagtgggtcaaccgactccctgagagagaaccaccgacataccttggcttgccagctaacgctgagaaattgttactcgttggacacggtaacaaggtgatctcggacttgtccagagtgacaactttgttggacgaaggggaacagttgatggttgacgcttgaatagagagtttgatatactcggagccgcaggcggatactttcttgtcaatcttgggttaatgtattctg

SEQ ID NO: 4872 - DNA, 448 bp, Aspergillus oryzae
cgaccactgcttttatcccagttcttgtctggtactcatcactaattcattcagatacttgctttccttttactgtgtatatctttattcctttctcgttctctgttctaactgttgtcctcctgacttatctttccataacttccacccccccaaaaacggacaaccggaaaatacgcagtgtcaccttcccgcccacgctcggtcaactaccttctgagtaacggatggcgggttaaacggtcgacagacgagcgagccctcttcgtccagctctggttaacataaacttatggccagaacaaggcccaaccttcaccgccaggaccctcttgaggattcatccactggagcccccgccactgccgccaggattactcgctcagccgcgagactagctgcagaaccccctccgcccgccacctcaggtccctctcccgcgaatccc

SEQ ID NO: 4873 - DNA, 452 bp, Aspergillus oryzae
acgcggcactcaactacccgttcagtctttcaaaatggccacagaactttgtcccgtctatgcacccttcttcggtgccttgggttgcacctcggccatcgtcttcacctgcttcggtgccgcctatggaaccgctaaggccggtgtcggtgtctgtggaatggctgtcctcagacccgatttgatcgtcaagaacatcgttcccattgtcatggcgggtatcatcggtatctacggactggtcgtgtccgtcccgatcgcgaacgacttggcacagacggtccctctatacaccggattcattcagctgggagcaggtctcgctgtcggtctggctggtctggcagctggttttgccatcggtattgtcggtgacgctggtgtccgcggaacagcccagcaacctaggctctatgttggcatgattcttatcctcattttcgctgaagttt

SEQ ID NO: 4874 - DNA, 457 bp, Aspergillus oryzae
cctcgtgccgaaagtgttgaagctagcatccctgagccgctgagagaagcctggagaaagcattctgccactggctttacgaaccaagatgagtttgaacaagagctggtccgtcacgtcgagactaccttggctcgttcgctctacaattgtgatgagctcgctgcgtactcgggcactgcacttgcgttccgtgaccgcctgatcatcgattggaataagacccaacagcggcaaagttctgcagaccagaagagggtatactacctctctcttgagttccttatgggccgagcgttggacaatgctatgctcaatgtcggcatgaaggacgcggctagggatggcttgaagaatctcggtttccggatcgaggatgtcattgaccaagaacatgatgccgctctcggaaacggaggcttagggcgcctagcagcatgcctgcttgatagtctgg

SEQ ID NO: 4875 - DNA, 457 bp, Aspergillus oryzae
cggcacgaggcaatatggagcgtatcatgaaggcccaggccctccgtgacacctccatgagctcctacatgtcttccaagaagaccttcgagatctctcccaagtctgctatcatcaaggagctcaagaagaaggtcgaggctgatggtgaaagcgaccgtaccgtcaagtccatcactcagcttctgttcgagacctctcttttggtttccggcttcaccatcgacgagcctgccagctttgccgagcgcatccacaagcttgtgtctcttggtctgaacgtcgacgaggaggctgagacctctgaggaaaaggccgctgaggaggctcctgccgctgccaccggtgagagctccatggaggaggttgactaaatgcttcggcagcagcggaaatgaaatccaactgcttttacgacctattattcaaaactgttccagcggtatttgcatcaggg

SEQ ID NO: 4876 - DNA, 473 bp, Aspergillus oryzae
ctttctgaacccgcttcgtgttgaagccaatggtggggatggaactgtggggagggttagcaagagatatgacaacccttacggctaggctaagcctacgcgctgacttactctacagtgaactcgcctccctacagggttcgttaggtcacgttagcgatggtggtcgaaatactagtttcggtcggtccagatgaacggaggcataccgcaagcacccgcaaaagcgacgattttcctgcattttgaagcccgatcatggtgacatccatctccgtcgccctgcaatttcgatatacaaagtaccgcacttagcaagccgaacctttttttgtttttgcggggacgggccggggaactatttccgggagaaccgcaaaaagcgaggatttattggaacagcggcccacttaccagaacatcctcaggagccagtcataaatcgtccgaaagatacccgccatgtttgcgat

SEQ ID NO: 4877 - DNA, 485 bp, Aspergillus oryzae
caacggagaaacagaaaacaaaaaagaaaagaaaatgaaaatgaaaaaagaaaaagaaaaagaaaaaaacccacgccggtagccttgtacagcacaacacgcagcggctgagaccgttccatcgcataaattgtcctgaacccagcaacctgggtgtcccgcaagggcccgtgcgggcgttcctcttccaaagttcatactaaaacagtagatcgccggagtgacgggctgagcgccaaacctctggatcagcggtgacgttggcctttcctttacctattctaggagactaaagaagatacatagcgcgaaacaaccaataccagcagggcattgttcctcacaagctccttaccttttattgcgaccaggtcaaattccaaatagacaaaggtacaggtactttggacgtacttttgtactagacgagtcaataattctagattggatccttacctttccgtgaatattaccattattatggg

SEQ ID NO: 4878 - DNA, 456 bp, Aspergillus oryzae
tggagaatgataagttcgaatatcttgccgaatacaagtcggccgatcctcagcgtggcattgctttcatgccgaagcgtggtgttaacatgcacgagaatgaggtagcccgcgccttcaagaccgtcggagatacctacattgagccgatctctttcatcgttcctcgccgtgccgagaccttccaggatgatatttatccacccacagtcggcttgacacccgccatgagcccatccgaatggttcgctggcaaagaagccatcccgccgaagatttccatggctagtttgtatgaaggagagggtctgaaggagattaccggtgtacaagacaagcctactgagaccttgggtgcccctgcagcttaggcagaacctgcgcccaagccggcagagccgactccggtgaagaaggcgcccgagcccgaaccaactcctgtacataagcctgccc

SEQ ID NO: 4879 - DNA, 456 bp, Aspergillus oryzae
cctcgtgccgaaaaagttacatccttgcgtctgtagaacagacccagtcaatctcttgacttcaaaaactcagaaaactttcacaaccaacacaatctcatcacagtctttttccttcttttccaaaaagacccccacattcaaaatgatgttcaccaagactatcactttggccgctcttgccagcctcgctgctgctctccccactgccaaccctgtcaagcgcagcggcggtgtcaacattgtcaacaacctgggtgaaaccgtttacgcgtggtctgtttctgatagagtcagtaacatgcataccctttctgcgaacggtggcaactaccaggaatcctggcaaaccaacgacaacggtggtggcatctccatcaagttgtccaacacccaggagcagtccaacgtgctccagttcgagtacactcagtcccggtgacaccatctactggg

SEQ ID NO: 4880 - DNA, 436 bp, Aspergillus oryzae
tttgatatcctgggtgggatgggaggcggcggtggcggcgccggccgtagcttccgctcaagccgtggccccagtgccttccagcaatctcagcgcgcacctacccccgaaccgaccgtagttgaaaaggagttgccattgacactggaagagttgatgcgcggtaacgacgaagcaggtgaccgtgaagagcaagactttcgacacgagcggaaagcgcactgtccaagatgtaactcttgaagcgaacattaagccgggcttgcggaccggttcgaagatcaaatacagaggtgtgggcgatcaagaagaaggtggaagacaggatgtccatcttatcgtgacagagaaagaacatcccaacttcaaacgccagggcgacaacgtcattacaactgttgaaatcagcctaaaagaggctctcaccggcttgggg

SEQ ID NO: 4881 - DNA, 455 bp, Aspergillus oryzae
gaattctacccaaacagcaaatggacgccaaagaccatcgtcttcggcgtcgaaccgcgtggctaataataataaaatcaccgaagccaaaacaacacccaaggatacgccgaagatggagacattcgtcatggcgaaccaggacacgcatcgggaaatggaaaacgagactacagaaccagctgcctctaaggtactggcacctgttagtacgaaacgtgaagacatggatggaaaacccgccgaatcaattgagcctggggaaaccccagctcctccggcaccaaacccaccagcaccgaagggtagatcgtccaagacatcgactcccgtcctgcctacattctcagagcccgcgccgcgggtccgaccaacacgaagtacggacgctgcaccggccaaacgatcgcacaagaagaatggaagtgtgccagtcgtgcaacagagggcggttt

SEQ ID NO: 4882 - DNA, 466 bp, Aspergillus oryzae
tcgcctgtggacgatcttttcttctaggaaattgtggattatccacttgaggtttctcccgcgaggtgctacaggatcgtccggctcgaggtattctgtctaacggaacggagagaatcattgacaggaaccccgaaggggcgaacgaaaaagcaaagagaattaaaaaaaaaaaaaaagtattaaagaaaagacataacctagaataaaataaaacggaaaaaggaagaggaacaggatgcgccgtatgtactctttcccctctctctttttgcatgattgatttttttttttctttttacatgtcctggattggatgttgctttttcttgtatttttttttcttcccttctggcatctccgctccacctttggatcgggtacccaatttgctcccacagttcttgcctggagttaccagaataggcaattgtccaagttacccgattttctcatttatctaaaa

SEQ ID NO: 4883 - DNA, 466 bp, Aspergillus oryzae
ggactgggtcacacaacatcggatcaagaatgccttgcacgaggagatgcaggctcgcttcgggaagtccggagttccttgcatccgtgagatgacgagtaaatcgggcgattggatgctctatcccgtgtaccaggtccggccgaatgcacgttggcatacggatcgggctttgctgctcggtgatgctgcacacgctatgcccccgcgcgacgaatccgccgcctacgccctcgacgacgcaatcctcttctcccgcatcctcgccaaacaccgtcacgaacccctccccgtcgccttcaaagcctacgaagacctccgtcgccacaccgtcaacacagccttcaaggcctcccgtcgcatgtgggagaagaaccgggacatgggattcctcgagggccggctcaaagaattgaccttccctctctacatccgtaatcatagacaggaaagagaagccgcgtgg

SEQ ID NO: 4884 - DNA, 445 bp, Aspergillus oryzae
cttcattttcagccccatgccatatgacccactatccccattgcgtattgctggagaccgtcctaaaggttgtcggttctttgaggatgtccagccgccttctggctgggcttggaaaagcaagaagtgggaacttgacctggattgccgcgagtgggttgttgaacgaatgattaccggtgtcggctttgaagtttcagaaagtgtctccgaggaaagcatggctaatgacgagatcgggggctgggtctgggacctcccatctgttacatcatatcgggatagtagcggggtaaatgctgcattaggttatgaggagtttgactccgacttgaaatcgtccgtaaggggcgaaatcaagaaggtaaaacggaaaggaaagggacgggcgtcccaggattatgaggagaagggaggtactggaccatcagtaatgggggaatgg

SEQ ID NO: 4885 - DNA, 427 bp, Aspergillus oryzae
gtattaatccaagttgcaaccagtacaacagaacaacccgagcttgaagctacaatttctgatatagctatgcgaatcaactctacattctcaaccctagctcatcaaccactggttttcctcaagcaggatctcgctttcccgcagtacctcgccctaatctcggttgcagatgctttgatgattaccagtttacgtgagggaatgaatcttacgagccacgagttcgtttactgccaagatggaaaatatggcaacaagaagtatggttctctgatcctgagtgaattcacgggaagtgcatcggtattcggaaatcatgctcttttagtcaacccttggaattatcggcaatgtgcggaggcgattcacacagctctgtcgaggagcgaggaggaacgcaagcaagtgtggactcagttacaca

SEQ ID NO: 4886 - DNA, 447 bp, Aspergillus oryzae
ggcaggttcgcccgcgtctaatgtatttcaccggtctgccgaccgaaacactttgcttgatcgcatcgtatctgccctgtcagcaagatgtctatgctctagcaagaaccaaccgccgtatatatcatgcgctacacgattttctctatgaatacaacagtcgttactaccatgggtccgcactagcattcgtcgccaaacatgggaatatagggcgcattgcacaacttttgaggggactcaaaaccgctcaaacaaggtcccgaactccaccaggacctcgctggagaagtgaagttccttcggagcagcgatgggaagaggattcggacgaggttgagtgggactcagacgacgaagatatgtattcgctaacccgcgatatttcgtctcatccattgaagagtgctaggtacagtgtggcagacattgtccagatccagaagg

SEQ ID NO: 4887 - DNA, 458 bp, Aspergillus oryzae
aaaaacgctcgtgtgacgccctcgaccacaactgcgaccggccaacacctgacttactaccactccctgttgtacagcctcctgagctgggaacaacctcgagctactgctgtttcatttgcgaccgtcgtgacttttattttcgccgcccgttacctgcctctgcttcgctggttctttaagttcatctatgtggctttaggattcaccgctgccgccgagctcggtggtagactcgtgctgtcgcagggcctcgcaagctctttccgccctcgtaaatactacaccatcccgaaggagaccatcgagggagtctatgaggatctcgagcagcttcttaacttcgtgctcctcgaatttcagcgtatcctgttcgccgagaacatcgtccacactgtcgctgcttttgctgccgccttcagcgcctactggttgatcaaatggcttccattctgggg

SEQ ID NO: 4888 - DNA, 408 bp, Aspergillus oryzae
gaaccttgagaaaattgctgaactggttgagcgtcgccaagcagagtcggatatcagcccacgcgacgccaccgcggttgactctgacggccttttaccacctgccccccaggaagacctttatcctatcctgccggttgtttcgtcgctgccaggaactaccgtttcgccgattcgcataccctttggccgcggctgtggtgaaatgatcgatttgcctgggatggatcggggcgacctagcagactacgtccgtgacgaacacaaacgagacacgatcatgactaaacggagaaaaccagaacggtatactataaagtcaggccaatcgctgcttttaggtggaggccttgtacgaatcacgtcggtgaaccctgacgatgtactaatggcagcctgctttatccc

SEQ ID NO: 4889 - DNA, 430 bp, Aspergillus oryzae
tgttatttgaccgagaaaatatagcctggatgcgacatttatctgctaagaagcttgctctacggcaacaagagcagtcatattggcagcaggacgatttaccaaatggtatccttcccggtgttcatactttacggggtggctcctccagttacaccatggctcgaatatccgactatactcgtcacgaagagaggctggcccgggtgcagctggcaaagtgggcatctgaccttcaacaaagcctacgtaatgaacgagaaagatacgccaccatagcaaggggggaacgtgctgtctggctcacagaacgactaggcgagtgtattgtagatggctcgttggtacctatctcacagactcctggcttctgcggtctccgtgtgcccgtggagaaagcaggtggcggtctcttagttcggacgcaaaa

SEQ ID NO: 4890 - DNA, 436 bp, Aspergillus oryzae
gaaattcttcttgcttcccaagaatgacgatacacatactgctcattgttcttggactcgacccccctctgcgacagggccaaactcggtacccattcctggttatgcaactgaagctggacgaagaaattagccttgagcttaacatgacagatgaattgatggagactcgctacaaggacaagttggagcctcgttatgaggaaccgattcatcaggtcgtaaccaagatcttccgcggtctttcgggcaagaaggtcattatgccatcgaaggactttgtcagccatcatggtcacagtggggttaaatgctctattaaggccaacgaaggtcttttgtacttcttggacaagagcctaatcttcgtcccgaagcctgctacgtacattcaggtcgagaacattgccattatcacgatgtcccgtgtcggtgg

SEQ ID NO: 4891 - DNA, 392 bp, Aspergillus oryzae
ggccgacgtccgttgtatcctgtcgaagggatggtcagatcgacttggagatcctgccagtgccaaggtcgagattcccttaccgccggagatcttccaaattcaagcagcgccacatgattggcttttttcccagatcgacgcagcggcacaccatggtggtgctggaactaccggagcgagccttcgggcaggtgttcctaccatcgttaagccgttctttggtgaccagttcttctttggcacacgcgtcgaagatttgggcgtgggtatctgtatgaagaagttgaacgtaagcgtgttttcgcgggctctgtgggaggctactcatagcgagagaatgatcgtgaaagcccgagagctaggtgcacagatacggagcgaaaacgggg

SEQ ID NO: 4892 - DNA, 335 bp, Aspergillus oryzae
gctgtatacaaatgcatcctgtcttggcatcttcgtccgtctttttgtcttttttccttttggtatctgagttttcagcggtatacccctctaaaaacggtttccctttgtttaccagctgttcctacttagttctcagcagtcagatcttacatttcgcttcaaccttagagcgtgttttccttattggcttttaatcgttgcttgatgagatgcatgatcttatgatttagacctattgcccaacggcgaaccaaccgctgtttgacatcggaaggatcaagtaactaacttgtcatcttcattcattcctttttacccctctcaaattcttt

SEQ ID NO: 4893 - DNA, 358 bp, Aspergillus oryzae
tgacggtgacggaaaacaggctataactattccttgttcactgcggtggtgccccatcgtccctgatcttgttcgtgcatccattatctagcgtcttagcgtcgtatacagacgcggttaataaatctctctaccccgcgcatcttacctcagaaaaatgtccaagttcggtgtcttggtaatgggccctgcgggcgcagggaaaaccaccttttgcaatgccgtcattcaacatctccagcatactcgtcgaagttgtttctacgtcaacctggatccggcccgccgaaagcttcagctatgaacctgacttggacatccgtgaactgatcactttggaagatgtcattggaggaaa

SEQ ID NO: 4894 - DNA, 348 bp, Aspergillus oryzae
caatgttgctccatctatccaagcagcaagacaggaactagaccgtcagcgcactactgatagtttgaagaaacatctcgagcacagaccggatcgcgaagaactggttgagcgcaatatcctcccgcataccaacgcagccccggcgcttcaggctcacgcccgcgaactggagaaacatatgctggctgatcatctcgaccagaagattcagaaccggccgcagccggaggatctcatggctcaggggatcttgacggaagatgaggatccgaggcagccgactatttgactgcaatcttcggcagttgttgacgggttatgatggatatgggttatggattatgg

SEQ ID NO: 4895 - DNA, 401 bp, Aspergillus oryzae
gagtctgtacaaccttgatcgacttgttgccagcacactagcccgaccgttgggcatcgcggacgaagatatcagcgtgaacttaccgcgtgaattcaacgatgactggagctgaagcgccgggagccagtgccatgacgatcccagtgcaggtggtgcgactgcgccggatattctcgcggatttaccgttacttatacaataaccatcctcctcctcctcccgccgaagtttcccttacactccttcacttccgccaagagcttgatgactggcgtcggaatgcgcccgtgtaccctcccgcccttctgtattccaccagttattacgattatctttatgcaaccactctccttctcatgcatcgacccagcccgcgaaatccgacaccggatgcgact

SEQ ID NO: 4896 - DNA, 371 bp, Aspergillus oryzae
cctcgtgccgaattcggcacgaggatcggctacgagagctcttaaccgatctcgccgagcaacaggatgcggcggcagcagaaggagatgtggatatgagagaagcgacgcaagaggctgaggaggaagaagcagagcagcaagaggagttttacactgagggatctcaagatctgttggaagcacggaaagcgatcgcgcggttctcccttcctcgtgcaaagcagcgcgtcgcccggcagaaagaagaatcgaccattccactccgaacgcacattaagcaccgcaaagcggttaaggagaagctacatgggtttgacctttacggttcacagattgcaggtgatcgtccagtcagtatctgtcgcttt

SEQ ID NO: 4897 - DNA, 299 bp, Aspergillus oryzae
cctttttaaagtcgcgtgcatttcattgcctttccctctattgaggtccatttcatttcttgttgtgtctcttccctccctctttcacccggtctttcttttgttcttctttgtcctttcctcatctcctccatttaccatcagaacctggtcacaatggtggtagacagcgagttggcgccgaagttcgcccccttcttctcttttgcagggatagctgcagctatgattttcggatcaatgggggcagcatatggaaccgctaagtccggcatcggtatctcgggtgtgggaacttt

SEQ ID NO: 4898 - DNA, 242 bp, Aspergillus oryzae
tgcgaacaagtccacccctttgtcctactctcagatggccaagtcatacctgatggcagtgtcggcatcgtgctcggtggcactgggtctgaatgctctcgtgccccgtctgaagggtttgtcgcccagcactaagctcatgctcggacgactggtgcctttcgccgctgtgtccagtgccagtgccctgaacgtgttccttatgcgtggtgaggagattcgccagggtatcgacgtctacc

SEQ ID NO: 4899 - DNA, 188 bp, Aspergillus oryzae
tcctccattccctaacggcatcgtaccccgtgcaagcgacgcaggaacaacagggcgagatgcggacgttcctgaagatattctcgcgcttgtatccgtgctgggtgtgtgcggatgatttccgaaactggatggccgagcccagtggacgtaatgagccgcggttaaaggggagagcggatttcggg

SEQ ID NO: 4900 - DNA, 264 bp, Aspergillus oryzae
gttccatctggcacagagcgcttttactctccctctcggtcgtagaattgagtatttaggccgtgccagggccaacgcttcgacatttacgccggatgttgggcgacagccccgacagcgcttgttgcaggatatctcgaatctcatagatcttgcgaacattcaggatgaccttctgcagcgtctgaaagacgataaagcgcttaacctcagaacgcaggtcgcaggttcttgcagatgttgacggtcccatcatggatatca

SEQ ID NO: 4901 - DNA, 205 bp, Aspergillus oryzae
catggacgaaatgcatacacccaaggactacgtcaagtctatctgggctttgggtattactgagattattatctacaccttgactggtgcgctgatttatgccttcgtcggtgtcgatgtgggtagccccgccctgctttccgctggtaatctgttgagcaaagtggccttcggtatcgcccttcccgttattttcatcagtggg

SEQ ID NO: 4902 - DNA, 431 bp, Aspergillus oryzae
caaagcttcgtcccgcccggcttcgaaatcatttctgatgacccctcctagttcacctgcgggtggaggccgagtggtagcggtcaaatcgcctgtacggcgagatgcacacgccgtccttgacgccgaagcgttagcattaactcgaatcagtcgaattccgggttcagagcgtcatgtaatccctttccatgggtacatctccgaatcacactccatagtcatgtcggctgtgcccctatccctttcatcatacatcgaagaaaaggccgagctggcccagaaacacaagtccactcggactatgttcgatcctgtgcaaggcatgcctcagtggcaagagcttgcaaagaagctgatcaccggtttatactggcttcacacgcagtgccaaatagtgcacggagatatcaaaccgcataacatcttgt

SEQ ID NO: 4903 - DNA, 384 bp, Aspergillus oryzae
cggcacgaggcacaaactcatcttcgcacttagggccaaccaactcttgaacaatatgccttcatacattgttacgtgcaaggaaaacgcatcggctgaggagattgaagagacaaaacaacatgtcagagaccaaggtggtgaaataacacacgagtattcgctcataaaaggctttgctgtgacttttcctgatggcgcggtgatgacactcgagtcgcatccacatgtagcatcagttgagccggacggtatcatgtcaacgcaatagacttaaggggagtttggggaagtctctggaagtattgcatatagagggggccaacaaatgatcttgtcttggtatgttcctattaccaggacctggtcggcaacttgcactgg

SEQ ID NO: 4904 - DNA, 356 bp, Aspergillus oryzae
ccatcaacaagatattcgacagctatcgagactctccggatgacaaccccgatggcatcggcattgaaggagcgatgaaattcctcggcgatatccaagtgcaactagacgaagtgacatgtctcggcattgcagaacttctgaaatcaccgtctatgggcgagtttactagagagggattcttgaatggatggagggctgtcggatgtgactccatcgacaaaatggttgcccacgctgacaatctccgatcgcggatccccacgcagccggatctcttccgtcgcgtgtaccgctataccttccctctctgccggatgcagggccagcggaacctccagtttgagatcgcagcc

SEQ ID NO: 4905 - DNA, 406 bp, Aspergillus oryzae
ctcttttttctgactagatattctctattccaatcatcgtgccctgccatacattgttccaccatgcaagttgaagtcaaccccaacgaagatacagaatggaacgatattctccgcaaacacggagttatcccggagaagcctcaggaccctgaacctctcattcaagaggcccttgttgaggcggagcgcaaagcctacgagaaccgactagaagataaagatttggacgaactagatgagctcgaggacgaagaggatgaagagttccttgaacaatatcgaaagcaacgtcttgcagagctctctacgctccagaaaaccagtctatacaaccaagtttaccctcttcagaaggtcgactatggaagagaggtgactgaggcatccaataacgcctttgact

SEQ ID NO: 4906 - DNA, 327 bp, Aspergillus oryzae
ggagaacagaaatctccagtagaacaaaagggtaaaagtccccttgattttgattttcagtgtgaatacaaaccatgaaagtgtggcctatcgatcctttagtccctcgaaatttgaggctagaggtgccagaaaagttaccacagggataactggcttgtggcagccaagcgttcatagcgacgttgctttttgatccttcgatgtcggctcttcctatcataccgaagcagaattcggtaagcgttggattgttcacccactaatagggaacgtgagctgggtttagaccgtcgtgagacaggttagttttaccctactgatgaa

SEQ ID NO: 4907 - DNA, 290 bp, Aspergillus oryzae
gtttgatcttcagatcgagccaattccttgaattattcacttgtgaaaccgtattattcatcgcttccttgagatagattcagaatcattgattgattctatagaacaattgtctattgaccgctctttataactgccgggcattgactattcccattgttgttgaatccgatatttattcttggtcctttttattatcgcgattgaccaccatcacgagtgcaatccttctactctcgttgaccccaattccctcacgtctcaaacaaaagcgggccttaaacgtgtcg

SEQ ID NO: 4908 - DNA, 384 bp, Aspergillus oryzae
caacccccacaatcccaagacacaataatgaccccaaccggcccaacaaaactccacaaacccctcaaacccgccaacaccccccaatggcgcgaactaatggtcaccctgaacccgaaagcaatcgacgaaaacctccccaacgaacccgaattcaaactcacccacgcaaaagcctcaaccccctcctccctcgtcatccccgagatctccccgcgctaccgcgccctgaagtcccaacctggctccaccatcgaaatcaagtccggaaagtcgcatctacgcatctgatttcgcccgccgaatcggcggcgcctcgcagcccccgcgcaccaaggccaggaatgcatctacgcaaccggcggcaccggcgaagcgcgtccc

SEQ ID NO: 4909 - DNA, 241 bp, Aspergillus oryzae
cctcgtgccgaattcggcacgaggagaagcaacggaaccataccgttttgtggatggcgagttgatcgaacagttcttgaattgtgagcctgagttgcaggaggaaattgtcaattcagtgggcatgatgaatgtccacgaggtgaaggttatgatagaagcattgaggcgattgcactagaattgtccgttattaaggagtacctgcctatgtctagagggctgacacgatttaggactt

SEQ ID NO: 4910 - DNA, 231 bp, Aspergillus oryzae
ccagaagcttgccctgcttatccaggaagctggtttccctgcgggtgtggtgaacattatttccggtgacggcgcatcggccggcagggctttggcagagcacatgactgtgcggaagatctcgttcacgggatccagcgcgacgggccgccagattctgaagactgcagcttcgactaacctcaagcgggtgaaccttgagctcggcggcaaagggccatcgattgtttt

SEQ ID NO: 4911 - DNA, 233 bp, Aspergillus oryzae
ttgaaggctaatttcaagaaggtcagaccaaatgattggtaccattaacctcctacatttcacaggtaaaacacagaaaaaagagcggtttcgtgtttggaaggaatgccctgaatagagattttaatatggctttgagaagcacatagatagcattggatcttgtgtgcttaagacccttatccgggggatgagtatttacttcaaggctgctattatactgaggcacaaaa

SEQ ID NO: 4912 - DNA, 224 bp, Aspergillus oryzae
aagattaagagctttttcgtgatatttatttatatccattcctcttcccccctggtgatatcagatttcgatctacatctctatctaccacaactatactatcttgtcgactttcgactactacaacatcaacgtcaactacaccatcaatggcatacactagaactgatccttcgttcaccttgagtgacgacgaacgcatgtatatgagccaccacagtccc

SEQ ID NO: 4913 - DNA, 250 bp, Aspergillus oryzae
cggcacgaggatgcccctcatcacagactttaaactccccacatcaccaaagcagctcgagctgcctgagggcagccgatgcaaaagcgttcatcgtctttgtgacttccgatgaccctacgactggtcaatcctggtgtcccgatgtccgtgccgcctggccagttcttgaggccacgttctccggggtgaacgcaccggcactgagggttgtggaggttggacagaagccagaatggaaggatttaaa

SEQ ID NO: 4914 - DNA, 376 bp, Aspergillus oryzae
cactcttcttccgaatcctctttgtaacacctatctggattgccctgactttgcctccgttgcatctcatcaccacgcgtcgtgttatcttgatcatcggcaccattatcctcacctaccactcccgaccagcgagggtatcccgcgttatactatggaggtcactaaccgtccgccggatttgctcgttgatcaccggtctatcgttctcgttgaacgtggacaagacgccgtcgactcggacacaaagccatggccatgctgctagcgttgcaactcgtcggcggggagaatcatccggtgtgcgctttaccttcatcttatatgagaatcaacggcgctggctcggaattggctggacctactcgctgttccc

SEQ ID NO: 4915 - DNA, 390 bp, Aspergillus oryzae
gcaagaaaattttccgcaagtttgtcgacccagttgacagtgatggggatgatgacgatgacgacttgggcttgctcgcagctcgcccagatcttttggacgaagacatcactgccaacgttcgaccactcacccgctcgtccatcaagcctcgtgtgctctttcccacagcaaatgaccgcgcacctccgtcaaatcatgttagcgatggcgatgaagaagcagctactgacatcgaagaccatatgctcgttcctgatgtagcagaaactgttgatcgccctgtcgacgttgagatgaagcagcgaccagttactcctccaccaaacactgttgaaactcctccctcgccaggtgcgacaatacgctcgttgcgttctcgaaccaagc

SEQ ID NO: 4916 - DNA, 410 bp, Aspergillus oryzae
cctcgtgccgaattcggcacgagggtcacccacaagtgtcgggcacgactattatgaaattctcggaatatcccacgacgcacagccggctactgtcaataagatttatcgctatctactacctacccttctggcctcttagggctcgcgcgccttgttattgatacagctagaaacagcttagcgaagcttacggggagctgtctgatattcataaacgccaagaatacgacaagctatatcgctcagcgatacttcccgggaaaatcaagagtcaaaagatagcagagcttgaagaacgacttcggcagtttgctcttaaacgcgagggatcgaaaacattactgtacaacacaaagaaagaccttattagactccgcgctgagaaagacagtgtcaaaggagaaaaa

SEQ ID NO: 4917 - DNA, 359 bp, Aspergillus oryzae
cgcggcccccagtttatccaggcgctgtcgcacaaataatagcaacctatcgatgaactaagatataaccgtccacatcctccccacccactatggccgtcttctcacttatcatcatcaataaagccggtggcttagtataccagcgcgaattccagcccggcttgcgcaagctctccacaaatgattatctcgtcctcgctggtacatttcatggtgttcatgccattactcgtacgataactcctaagcttcctctttctacggcctcgacgacagcaactaccccgacttcctccaatatcccctcaacccctggcacacccactccgctactccggcatcagcgttcacgtttt

SEQ ID NO: 4918 - DNA, 383 bp, Aspergillus oryzae
cctcgtgccgaattcagcagtaagcgccgtcagaccagaaaagagattttcttgtcccgcatggagcagattctgccatggcaaaacatggtggaagtcatcgagccgttttaccccaaggctggtaatggccggcgaccttatccgctggaaaccatgctacgcattcactgcatgcagcattggtacaacctgagcgatggcgcgatggaagatgctctgtacgaaatcgcctccatgcgtctgtttgcccggttatccctggatagcgccttgccggaccgcaccaccatcatgaatttccgccacctgctggagcagcatcaactggcccgccaattgttcaagaccatcaatcgctggctggccgaagcaggcgtcat

SEQ ID NO: 4919 - DNA, 351 bp, Aspergillus oryzae
cggcacgaggcaggacgataagtccagtgcggaagtcaatggcgcagttgaggccgatcgcagtacagaggatttgtaacgctgttttaaagtataatccctatcaacaaattggcgcttcatgggttctccagattcttgccttgcgcattcatgacaacgatgcgagtataacgatatctacaaaatgagttcgattgaaagagtgcgttcgatgcattgttttccgcatgatccgatattccaaggcgctgccttcacaagtctccagggaggcttactcttgtgttcttgatgtaaagttattatggtattgatattcccgggacgcaatcgattagtacgtgcttt

SEQ ID NO: 4920 - DNA, 394 bp, Aspergillus oryzae
ggattgatacctgatattattgcttgtcaaaatgcgacaccaaacctttacaccgatctttctaatttttttgattatttgcacaatatctatagcatcgggctttcctcttcgcaagcgtctgccgcgtccgtttgtcgatctgcctcacttacggcacgaacagcgcctacaggagaacagcgaactgaagcagtggcttcagaatcagcagcccatcatgacccctaatattgctatgccgcccagtgaggggagcagacggcctcaggattccgacagtgatggccctgtgatatccgatgttcttcctaaaaaccgtggcatcaatatctttgcttctcttacgagggattttgagcccatcgattctcgcttcaacgatgcgacaaag

SEQ ID NO: 4921 - DNA, 243 bp, Aspergillus oryzae
cggcacgagggatcgacttgggattatgatgcggtcatggccttatggttatcatagatgatcattcgatcatatcagagccgatcagtgtcgatacttgctatgcttgtctctgtaatgctatcgaccacgatttaactttggaggatactgcagcccataacgtcaaaactcaacacgcacactacttccatagggaaagttaatgattgctacaagatctaatcactatctgatgtgaaa

SEQ ID NO: 4922 - DNA, 213 bp, Aspergillus oryzae
gacctctccttctacttcgagaccgtctcaagagggataatcaccgcgaggattaaggtggcccctgtattcctgcagttatcttgtgcggtcaacggagggtctgttccaggcgcttgcttgttggcctggtttagcctccagctaacgcgccaaatggctcctggctgctatggtcgtgtcctgatgtacctgctactcgttctacttttt

SEQ ID NO: 4923 - DNA, 233 bp, Aspergillus oryzae
tcgtttgctagacgttgttcaaatctccatcaaaatgtcctgcattaccacgccagccattcctccggtggctcttgaatcaatcactcaacacattggtaacacgcccctcgtgcgcttgaacagacttccacgtagccttgggattgaggcaactgtctatgcgaaattggaatatttcaatgctggaggaagtgtaaaagataggattgctctgcgcatgatcgaagagg

SEQ ID NO: 4924 - DNA, 199 bp, Aspergillus oryzae
ggaacgacttcgttgcctcggctagcttcccacttcaaacattgatccagtctgctcccgagtcagacccggagaccgggctctataagttcttggaccccatgcttgatcctacagggtctaccgagtctctctccaacaataaggccgggatcaagatcggggttagcccatccccatcgactagcagcctatcaaa

SEQ ID NO: 4925 - DNA, 215 bp, Aspergillus oryzae
caaagaacgtgacaggttaaaggcagacctcggtaaccgcaaatcgttagctagtcagatgcgcatgaagacccttgccaacctcgctgcggatggccccaagaagcgaagacgcggtggcgatgacgacgacttcggtgcgaacgacgaaagactggggtgtctaccgtaccgtggccgggggagcagagtgacgaagaagaggaagaggacct

SEQ ID NO: 4926 - DNA, 270 bp, Aspergillus oryzae
ccagcatgggtgcaggtacttgcagcggaagctagaggagcgcaacccggaccacgtccagatgatctttgacgagacgcatttgcatgttgtggagctaatgaccgatccttttggtaattatctgtgccagaagttgcttgagtactccaatgacgagcagcgtacagcgctgatcaacaacgctgcgcaccaacttgtgaagatcgcactgaatcaacatgggactagggctttacagaaagatgatccgagttcattatcaacccc

SEQ ID NO: 4927 - DNA, 182 bp, Aspergillus oryzae
attcaaaagaaaataaatacatttagttcttcagacatatctatcccatctactatacaaactactatccatctaccaatctatacaaacaccaccaaaaaccctaaagaaagatgtgcggaatcgcccgccccagcaccggccaccgcatcgccgtgatgttcccctccgccaacacaaaa

SEQ ID NO: 4928 - DNA, 224 bp, Aspergillus oryzae
tagtgaaaggctgtctatctaaaaacatgggttccaacctgccctatgccgccgatgctgaaagccctctaaagccagcggagctccaggtcttgcgggcgcagtacgaaaaggaaggtgactatgtcggtattcaaaccaagttcaactttgcctggggtctgatcaaatccaacgcccgaccggaccaacaggaaggagtcccgtttgctatcagagatctt

SEQ ID NO: 4929 - DNA, 179 bp, Aspergillus oryzae
tgaaagccagtactggatcattagagggaaatttcccgctagtcgcggcagtatagcgataatcgcgtttgtagccgctgctttgatcatagccgctttagtcgtcatattggccatctcaccgggctctgttgaagcttagtttagcgaagcaggcgctgctactcattactcccctt

SEQ ID NO: 4930 - DNA, 301 bp, Aspergillus oryzae
caagccaccccaggttcccctcatttaccacctcccccgccgccatgatgtcccagtctctcagagcttctcgctctctcttcgcccgcgtctctcggcaacaggtttcttcggcttctcgccgcactttcctgacttccgctgttcgtcaggccgaccccgttcaggacctctaccttcgtgaactccgtgctttcaagcccactcccgtcaagcccggtgacgccgaagctcacgtccagaagttcagcgttcccgctgcccccaagtcccccgaggaggccaaccttgccaatgaatt

SEQ ID NO: 4931 - DNA, 344 bp, Aspergillus oryzae
caactctcttgcgacaaacacaccagcagagccaacatgtccgccccaagactcatccagcgcttcgcgcgaccctcattgtcgccattctttctcagaacaaccctcgcccgtcgctccttcggtagctcggcaattcgtcccaaagacgataacggccgcgctccctcaacagcgccagagcaccgtgaataccagaccaaccggcctcccaaccaagcatgtacccaacacgacttctaccatgaccagggactttcccaaggccggggaaaaagtccgtgccaccggaatttgtcaagcgctgcccgacccgaactacaagcccggcggatccctacccc

SEQ ID NO: 4932 - DNA, 355 bp, Aspergillus oryzae
gtcgcggagctctggaggctttgtttgcttgcctgggtcttggtggtggtagaagaagaagaaaggagaccacatatgtggaagatcggtattcccaccatacgcatggtggcaggcctgaaggacgtacctggttcggttcgcgtccgtcagctccaccaccccagactagtgaaaagaagaaatggggcgggctggcaacccttgggatcatgttgggcgcgcttgctctatgtctgggattgaagaggcgcagagaccacgaggatgaaaagagcgactacacttacccgagttcatactactactcagattattacaccagcacaagtagccgcaagctcggatcggcgaa

SEQ ID NO: 4933 - DNA, 338 bp, Aspergillus oryzae
acaccatctgttaaattaagtcaacatgcctccgaaacgcgtaaggaagaccgtttccacgactcacaagccaccctcccctccactctctgagtaagaacgcctcagtggcggacgagaatgccgatgttgagccacctgaggcacaggacaaaggctcgatgggcagtccacgaagccctcgccacgatgaaggcaacgggccgcccgttatgatggacgaagacgaagaaatgccggaagaatcaggaaatccatccaacatgcaagaccggaatatgccgtaggggcgggaggttataacatgctcaaatcctacaaaggacaggttactcggg

SEQ ID NO: 4934 - DNA, 204 bp, Aspergillus oryzae
ccagatgcgaggggggattctggaccttccgcgtaccattgaacacgcgtgcacccttttccatgaaccacaaggaccatactttgacttgcgcgagcgggtgccccgcgaaaacctcattgcgggagatttcctgaaagcagtcccggcgtattgagatctatacgatgaagtgggtgctgcatgactggaaggatcccggac

SEQ ID NO: 4935 - DNA, 192 bp, Aspergillus oryzae
cgagtagctcagcatccacaatcaaggtactaactggaaatcatgagagctaatgtcgaaagtgggtggatgcggaccccggagattcttcggtgccctaaccgtccagacaaggatgaagattcggtataactaatgctaatataatgtggcccgattacacgccaaggatccttccaatggtactgtagg

SEQ ID NO: 4936 - DNA, 175 bp, Aspergillus oryzae
aattttcagtgaaatcggcagttgtatgggcaggttcaactttatcagcggaacagagccagttttggagagacggccgtttcatcgctttagactatagcacaaccgccggaggaacaggccatatcggctttctttgtcacaaacaacctatactcgagaagaacttgcgaaa

SEQ ID NO: 4937 - DNA, 152 bp, Aspergillus oryzae
cggcacgaggctcagcgaactcgacgtttcagtctccgcccaacttgcggttaaatcgattgattctcgtgttcacatattaaacaaatctattcaaaatgaagcaccttgccgcttacctcctcctcgccctcgctggcaactccaccccc

SEQ ID NO: 4938 - DNA, 327 bp, Aspergillus oryzae
ccgtcaatcacacaggaccaatccagttaacgctgattttctacgctcatcgtcgttcaacttcgtcaatccacgccacaatgttataagcaccacggattgcgtgacgcaaaagctcttagaaacagacatcgcaaaattaagcgacgaggaagtattgtcattgtttactacaggattttttggcgggtacgcctttgcttgcgaaagggtgatcctcagagctgggggatggaaattactctcagtcaagttttcaaattttgaagatgacccggcggcaatgaccatatgggactacacgaagatcccaagcagcaagctctt

SEQ ID NO: 4939 - DNA, 326 bp, Aspergillus oryzae
tggaagaattcacatccgccaaaatccactccctcatcaaccacctccaccgcgtgccctcaaacaccaaatccgtcgtcttctcccaattcaccagcttcctcgacctaatcgccccccaactggataaagcgggaatcacctacgtccgtctcgacggaacaatggcccaaaaagcccgagccgaagtgctcgcccagttcaacaaaacagaaaccttcgaccaagaagaaatcgaagacgcagagcgagaagacgacatcaatagcccctttaccagaaaaccactaccaactaggaatggccacgcatcagcgagccccagt

SEQ ID NO: 4940 - DNA, 278 bp, Aspergillus oryzae
gagctagccaactcccaggtgtcccatcagtcttagcagccatgggtatcgacttggatcgccaccatgtgcgtagcagccatcgcaaggcgccgaaaagcgagaatgtctatctgcaagttttggtgaagctctatcgcttcctcgcccgtcgcacggactccaacttcaacaaggtcgtgctgcgtcgtcttttcatgtcgagaattaaccgcccccctgtttctctgtcgcgtatcgcttccaacgtgaccgatgcgcacaagggcaagaccatc

SEQ ID NO: 4941 - DNA, 288 bp, Aspergillus oryzae
ggcgtagattgcatagtcaatgcagcaaacagatccctcctgggcggtggaggtgtggacggtgcgattcatcgcgctgccggacccaacctgctgcaggaatgtcgagtcttggatggatgtgataccggcgatgccaagataacatcagcctacgaacttccatgcaagagagtcatccacaccgtcggacctatttaccgttacgaactacgagggggagatgaccgaccagaggcactgctgcggagctgctaccgacggagtctcgagctcgccgtggaaaaa

SEQ ID NO: 4942 - DNA, 281 bp, Aspergillus oryzae
tcctatcaattcccgacctttctcgcggtttcccacccagcgcttctgtctgtgttttagtttagatttttgtcttcatacccccccaaacaagatgtctgagaacaaggaattcaccttccaggaggtgtccggccacaacaccaagaaggatctttacatggtcatccacgacaaggtctacgactgcacctctttcgtcgatgagcaccccggtggtgaggaagtcctgctcgatgtttggtggtcaggatgccactgaggctttcgaggacgttggt

SEQ ID NO: 4943 - DNA, 327 bp, Aspergillus oryzae
gtcagacaagacgagcaaccaattggctggaggattacgaagttcataaactttgggaaatcttgagccccaacgggcgccacatcctatcgcagcgtggttactgcacatggtggcacaattcgcgaatatgtccggaagattcgacacacttgttcgttgcgttttgtgctggcgggactatgaacggcaaaagtaccaaagatacagtactaaaagttcaaagcgctggttcactgcgcagagtccttccggtagggacgatgcgtttgatatggggtatgctatccacatttaccatgtttcatgccgacccacaggaaaacc

SEQ ID NO: 4944 - DNA, 321 bp, Aspergillus oryzae
cagccagcaacaacgaaaaatcgcaaccatgcagattttcgtcaagaccctcacgggtaagaccattaccctcgacgttgagtcgagcgacaccatcgacaacgtcaaggccaagatccaggacaaggagggtatcccccccgaccagcagcgtctgatcttcgccggtaagcagcttgaggatggccgcaccctgagcgactacaacatccagaaggagtccactctccacctcgtcctccgtctccgtggtggtatcatcgagccttcccttaaggccctcgcctccaagtacaactgcgagaagaacatctgccgcaa

SEQ ID NO: 4945 - DNA, 350 bp, Aspergillus oryzae
cgctttgacgtgcaatcattgagatcgtaactgttggtgctgaagtctatttgcaacaccccaattctagtcaatcatcaatatatcagtagctccagccaggccagcacccactacgcagcaaccaattatctcaaccccacgtcacagtcaaactggctgcgcgaacctgcagcaggagaatcttctccctagcatcccatttccaaaagacccaatccaacacaccacaaaagcttgtccaattcggaacagcatcttcctcaacaatggcccctcaagccccatggcgctctctcttccagtctcatctgactcaaaactcctccacttcctttactctctcgacc

SEQ ID NO: 4946 - DNA, 288 bp, Aspergillus oryzae
ctaagtgatacaatcgaaacaaacctgacatcattgtctcggcaatcatatccgcttccctcggacctcgccatcaccatgtccaaagccggaacctggataaagatgttcgtcgtcggcacggtgatctgtgtcggctggccccgctctcgtccaagccatccgtcctaccgatgaagaattgtttaagcggtataacccggagctccaacggcggagtctggaggagggtgatcgtcgcgcgcaggaattcgatgattatgtgaataagttgaagcagtggtctaa

SEQ ID NO: 4947 - DNA, 308 bp, Aspergillus oryzae
catcgtcaaccgtctcccagttgcgacaaatccgacaagatggccaagtctaagaacgcgtctcagcaccacaacagccagaaggctcaccgtaacggtatcaagaagcctaagactcaccgttacccctccctcaagggtgttgaccccaagttccgccgcaaccaccgttacgctcttcacggtaccatgaaggctctgaaggagcgcaaggagggcaagcgcgaggtcgcataaatcaacttaatttagaaatgaattaaaaatgggagcgcatttgagttggtgtttcacacgtgccatgatcc

SEQ ID NO: 4948 - DNA, 294 bp, Aspergillus oryzae
atccgaaccctcgagccctgcggaacccgtcaacccagactttttaaaccctaaggatgccgggtctaccagcgtcagtcggactggttcgatcatgaatttgacgaccccgacgctttatggtatctattcgccgacggcattcgaggattcccgggacgaatccagtccttggggaacggaagctcagacgccagccgtcgaaaaaccaaaccccctcacagtaccggaaaagccagatcgattcaccctcaagagaacccggtcacgactcagtcacgggctattcatggg

SEQ ID NO: 4949 - DNA, 279 bp, Aspergillus oryzae
gatgattcaattacccagaacctcaatgctctgttcactccgtcgcgggagggcttcgatccctcgtcgactgcggtacgtcaaacagattcaaaagctgggcgtacaatagaccctgccgcttgtcagagtttcaaagacaacgttctattcccctcatggcagacacggtcagacgtgctcaattactgcgccggcgtcgctacaagtcccgacccggacgacccggatcttgtccttcgacagaccgaatctgccagggaccgagagcgagtcgtc

SEQ ID NO: 4950 - DNA, 266 bp, Aspergillus oryzae
ctcgtgcagctttaatttctcgacacctttcttcgtccgctaccccgccgcagtcgcccaccatgtcttacaccgttcgcaagatcggccaggccaacaccctggagcaccgtgtctacatcgagaaggatggccagcccgtctctcccttccacgatattcctctctacgccaacgaggagcagactatccttaacatggtcgttgagatcccccgctggaccaacgccaagcaggagatctccaaggaggagttcctcaacccc

SEQ ID NO: 4951 - DNA, 343 bp, Aspergillus oryzae
ggttcgaccacctaggaacaaggtcgctaaggctgaactgcaagggaaacatacgtgctgacgataaatccaataccgatcatttgctgtgacaagccgataataaagcctcggcttcgaggatgagcacactcggcctgataaactggaaccgacattgacaagagaccgacagcccacccggccagaatacgacccacgagcatcatagccaagttctgggcagcggtctgaaggatcgcaccaacaagacatatgaaggcgcccatttgaatagtaaatttccggccgaagccgatccatcgtcaagtcctccctggagggcgcccaaagcagctacggg

SEQ ID NO: 4952 - DNA, 403 bp, Aspergillus oryzae
ccgtgagatcgaactgaaagccgatgaagagtttgcagattgagaagtcaaagctcgtccgtcaggaaaccgctgccatcgacacactgtacgagaagaaattcaagcaggctgccatgtcccaacagatcacccgctccaccctttcaaaccgtactcgtctccgtgttctttcttctcgtcaggagcttcttgatgagctgttccagcaggctcgtgataagatttccagcatcgcatctaaggatgctaagaagtatgaaactgttctgcagggactgattctcgagggcttgtacgctcttaatgaggagaaggtggccattcgtgtgagggcgaaggacactgacgcagctaagaaggcgattgaggaagcgcagaaggtgttcaaggagaaggttgg

SEQ ID NO: 4953 - DNA, 467 bp, Aspergillus oryzae
gcagggagtctttcttcttgtatactaacctccaggtctctatctagaaagtcgccatgggtcgcgtgatccgcaaccagaggaagggtcgtggatccattttcacggccaacacccgtctcaacaaggcccctgctcagttccgtacccttgactacgctgagcgccatggatacacccggggtgttgtgaaggagatcatccacgaccccggccgtggtgctcctctcgctaaggtccagttccgtcacccttacaagttcaagcacgttaccgagaccttcatcgccaacgagggaatgtacactggccagttcatctacgccggaaagaacgccgccctgaccgtcggcaacgtcctccctctttcctccgttccttgagggtaccgtcggtaccaacgtcgaggagaaggctggtgaccgtggtgctcttggtcgaacctctggtaactacgttaccgtcat

SEQ ID NO: 4954 - DNA, 351 bp, Aspergillus oryzae
gtcgcctaaccaatccttctgaaaccccgtttgatccaattcgttcgtcatgcgtaccctcaccctcttggccaccttactggccgttctggccggcctgtacaactacctcaacgcgcgtctcgagcagttttacatcttcgaacctggccagttgcatgacctctctcagcgtgcaattgctgcccacggaaacgatactcgcgccgttgtaaattacattgtctcggagctagatgagaaggtccccggaagccacctgatacaaggaagaggaatgggtgttcaacaacgccggtggtgccatgggtgccatgtatattattcatgctagtattacagagtacttga

SEQ ID NO: 4955 - DNA, 436 bp, Aspergillus oryzae
cctcgtgccgaattcggcacgaggctctgctgtcttgtcgcatcttagatctacagtgctatatactcgaagtagccatccttttgtgggtgcagcaatttggtcagttctcgccttggaacacacccactactagtacccctccaactccgtccgcggcagaattaaagcagtatgggccgtgaagatcagattgaagagcgcgaggtgctcgattccattttcccagaggaaatcacagatctatcggatacatcatacaggatatcaatcgccctcgacgcgccggatgatgacgtcgaagaagctgaacagcccgtgttgctcttgcaggtcacgtatcctgcagattaccccgatgttgccccggagctcgaaatatccgctcctccaaacgctcccaaacaccctcggctagatgtccaggaagatcggg

SEQ ID NO: 4956 - DNA, 415 bp, Aspergillus oryzae
cgatcatcgccttcgcgcccttcatcctaactatcaaacacacacccgggcagaaaactctagaatggcctcaaagtttctacgagaatacaaactggtagttgttggtggtggtggtgttggaaagtcatgcttgaccattcaattgattcaaagtcacttcgtcgatgaatatgatccgacaatcgaagattcgtaccgcaagcaatgtgtcatcgacgaggaggtcgctctgttggatgttctagatacggccggacaggaggagtactcggcaatgcgtgaacagtacatgcggaccggtgaagggttccttctggtttactccataacgtcgcgccagtccttcgaagaaattatgacattccagcaacaaattttacgagtaaaggacaaggattacttccctatcatc

SEQ ID NO: 4957 - DNA, 337 bp, Aspergillus oryzae
agcaagtccctggtccttgacccggccctccagaaatactacgagatcaacgcaaaccgctacaagtacttccgctggaccccgcgccatgcctggctctcgtttctctacatggctgtgatccccggaacgctgggctacattgcctacaagactgagggcaagtacgacttccgtgggaagaggagaggagatacgcttgaggaattttgattgatcgtttttttgcggttgattggcttgatggtggatgaaaatgaagggtttgtcgaggatgacgacactcatcgttagatgtgtatttattacggaatataccgcttgttgtttctttttt

SEQ ID NO: 4958 - DNA, 266 bp, Aspergillus oryzae
cgtcaggtctctgtcgagccagtcaacccaccttctcaagtcaaggttcttagcactactactgtagttgattatccccctgctcgcaagatgggatactacgacgacgacggtaactaccactccttccgtcgtggtgtggaacgcgctgccgaccgcatcatgcaccctttccatcaccatgaccaccatggtgaacatcatcatcatcatcatgatcatggccgtcaggatgtccgccgttgctgacgatcgcggtccagttt

SEQ ID NO: 4959 - DNA, 305 bp, Aspergillus oryzae
tctgaacaaacatattgctattactatgacgaactttaacattcagatcatctcggacagcgtctgtccgtggtgctacgtaggcttgcgccgtctttcccgcgccattgcaacccataaatcagtccaccccactgatacattcactctcacctggcacgcctactacctgagacctgacaacccgccttacccgggcctagacaagagagagtactatatcagccggtttggggaagatggattctctcagatctctacaaactcggtgaggttggacgacaagaagggatagcgttcaattt

SEQ ID NO: 4960 - DNA, 325 bp, Aspergillus oryzae
ctcgagaagactccagatcacagtcgcccgtctcccgaccctcaggcgacaggcattatcgggaccgcagcgaccctcctaaacgtaaacacaattccgacggagcgtcgcaccagccttacaggaagaaggtccagctgccaaaaaaggaacaccagtacccttccgtcaatgaattgaagaagcgcattcgcgatgtcaaacgtctcttgaaccgggtggatctcccagcagatgcacgcattgtgcaggagcgtgccctcgctgggtacgagaatgatctggaggaggaagagaaacgccgggagcggtcaaagatgatcaa

SEQ ID NO: 4961 - DNA, 303 bp, Aspergillus oryzae
cctcgtgccgcgcagaagacgaaacagctgcctgattacattcctccttacccttacggccccaaccatgtctacaagcagtcgaacagcggtctctatggaggcgttatgatccaattcggaaacaagatctccaaaggtcggaatgaggggaaaacccgacgcttctggaagccaaatgtccgccgaaagaagatctacagcgaagcgcttgatgagtggctgttcatcaaggtcacacgtaaggctctgaggacgatccggaagtctggtggactcgacaactaccttcttgacgaccgg

SEQ ID NO: 4962 - DNA, 275 bp, Aspergillus oryzae
cggcacgaggcggatgagaaaggtgtcgacttgagcaaggtttgccggttggggggacatagtcgcccgcggacgcatcgtggggctggtcagcgaccgcctgggatttctatcgttagcacgcttttggattctttggagactagttccctgtttcagcttcggtcgggggctagggttacgaaggtgttgcgcgaggcggatgaggtcttaggggtccagtatacaggtggtgagaagacctgaaacggaaggacaatactaccactacgctt

SEQ ID NO: 4963 - DNA, 321 bp, Aspergillus oryzae
aaaccagcacttcgtctcccggctcagattccattcctcccacaaacccagtccaccctcttttacaatctgctttgtccaaagcaaagactgttctgaacaaagatgtattcactggccttagaagctactgcgacagatgcgatatcattgtctacgactttaagtactaataaagcgccgtctggaggtatctccgtcgtgaatgggtacggtccgaccgacagactatcgagacgaaaagcggatagtgtttgtcgcggattgaccgagctttgtcttgcattgtccggatgaacaacttccgtagacagcaggcct

SEQ ID NO: 4964 - DNA, 241 bp, Aspergillus oryzae
cgtgttcaactaaggatttcccccgtcaaccacacgtatctagggcaccaagctacccttttcctcctcccccctcttcaagttactcccacccatccattccaaggagtttcaagtacaggcagcctttagctaccctgagtccttgacaacacacaaccggtcaggtttactcgcgatttctaccaagtatcttcaactctcgaccttgtgatctcagccatcaagatgtctactgccg

SEQ ID NO: 4965 - DNA, 224 bp, Aspergillus oryzae
gctactcagatcgagatcaaccctctgtcagagacctccgaccaccaggttatggccatggatgccaagttgggctttgatgacaacgcagacttcagacaaaaggaagtgttctcgtggagagacaccacccaagaagacgctgatgaggtcaaggctgctgagcacggattgaacttcatcaaactcgatggtgatatcggcttgcttggttaacggtgctg

SEQ ID NO: 4966 - DNA, 299 bp, Aspergillus oryzae
cagggctagacggcggcggtggcagctgcatcaccttgaactggtcaacgctgatgatccgcaagcggtagagatactgcatcagttgaaagtccggtcggcttccagctagggtctggccccgttgataatgtgctacatcgacatggtcgagcatgcgatcccatcctttctgttcgggggtgtcgctgaaccgctcacccggacatagagggcatcgggctgttcgcggtggttcgtgggttcggaagtggctcagaacacagatataggtatggtgatgatattgccgagcaggg

SEQ ID NO: 4967 - DNA, 278 bp, Aspergillus oryzae
cccgaggtgagaagcagctgtataccaaccttgttcgcgttcaagcttacattgaaggccttgtcgaagctgagaagagtgatatgcgccaggacagcctcaaccgggttgtcatgcgcaggctggagcacatttacttcaagccttctcaggttgtgacaatcctggaagagggtacttggaaggcacttccctccgagttggactccaaggttacgcctcgtggaaatgctgatgacgtgacaggacttggtccagaccctgtgcaactatctctt

SEQ ID NO: 4968 - DNA, 277 bp, Aspergillus oryzae
cggcacgaggcgccaaccgcccaactcgcgaactcaacggaccgtcgcaatggcctctactgctaccaccgtccccactcaggaccatgtcctcgtccccgagactctcctgaagaagcgcaagagccaggagcaggctcgcgctgtcgcccgtgaggaggctgagaagaagaaggccgccagcaaggagaagcgtgccgccatcttcaagcgcgccgagtcctacgtcaaggagtaccgcgatgctgagcgtgagaagatccgccttgcccgcgtt

SEQ ID NO: 4969 - DNA, 249 bp, Aspergillus oryzae
catttcgtctatccaattaattgaactagggtgctttgagtggtagaagttcactgaacaccggaaacaccgtcaatatgcccccgaaaggtgccacgactcgtctcaacccggtccgtctgcagaccatccctcatcttcgagtccgtcgtccgaatcagcatgagcagaacccctgtgtgacagtcatgtcttcgatgctgagttgctgggcgtcggctggatatactgcagagggatgcgcagccc

SEQ ID NO: 4970 - DNA, 274 bp, Aspergillus oryzae
tataaaggcatgtcaccttctggattcaacatgtcggtccttaggaggcgcggagccctgagtctccgcgaattaagcttgtcaacacctgttacggtagtaagctgtcgcgcgcggtctttctccgtgaataatcgcccgccgccaaagtatcccggccatgtcccgctgaacttcgtcgagcgtggtgctctggcggttgggtctgctgtgggagctttgttgaatcctcggagagcagatctcatcgcagcctgtggtgaagcaaccgcaa

SEQ ID NO: 4971 - DNA, 323 bp, Aspergillus oryzae
tacatcctccacctgtcacaattccgaaaccttgacgaaacaatcacagtcctcaacgcctatcaaaagttccgcagccactgcatggacgcagggatgaacaccctcttccctaagctcctcatatatcattacggaccatctcgcagttccagaagcaccctgatctacgatgctatcctctcctacatcgagacggacatgccgcgtctcaaatcgtgcatctacgtaatgcaaatcggcccgccagaccaactctggaatactcttctgaccagagcgaaagtcgtcattgagctatccatggtgcgaaggcatccccg

SEQ ID NO: 4972 - DNA, 297 bp, Aspergillus oryzae
aaaggttatcgaaatggcccgtgtatctcgtgagcgccgcactcttggattgaagactcctctgaagacgcttgtcgttatccaccaagacccgcaattcctcgaggatgtgaagtctttgcaaagctacattctcgaggaactaaacgttatcgagctcatcctgtcatctgacgaggagaaatacaatgtccagtatagcgttactgctgattggccgaccctcggaaagaagctgaagaaggatgcccaaaaggtcaagaagtctttgccttcgctcaccagcaatgatgtgaa

SEQ ID NO: 4973 - DNA, 301 bp, Aspergillus oryzae
agcaggccatctccatcagcgcaccattcaacttttatcgctgatcgacttttagtctcgtcaagatggttctcgcggtcgaccttctcaaccctacgcctcaggccgaggcccgcaagcacaagctcaagcaacttgtgcctgctccccgctccttcttcatggacgtcaagtgccccggctgcttcaccatcaccaccgttttctcccacgcccagaccgtcgtcgtctgcgccggttgctcgaccgtcctctgccagcccaccggtggcaaggcccgtctcactgagggctgctcttt

SEQ ID NO: 4974 - DNA, 280 bp, Aspergillus oryzae
cgagcgagcaagaccctctcattcgtctccgcactcacctctttcccccgcgtctggaaatttctcagacgtcccaccatcggccccggatgcaccaggatcccctttcactagttcggccacgagccactctctaggttccaataccatcagtgaccattgggcgaagagtgtattcaaagaagcgcgtgcaacgactcggattccatatgttggagaaagttctaaatgtcttggtgacgttactcctggagtaaagcgatggctcaacgagacgggg

SEQ ID NO: 4975 - DNA, 318 bp, Aspergillus oryzae
gatcgacgatgaatcctcccgtcgtttttctcgctatactatatatccccttgtaacatcagccgcaccgcgaactatctatgagcctgaaaaacggacaccctgtcgcaacctgcggttgtatcgaaccaagggacacaccccactgtctataccgagtccacccgagctcatacatcatcgggtacactattaacaccacactccttgcattacggcgtggatgggtttagggttgggagcattggagttttcttgagatttgattgtggctattgacagtcaatcaatacattgtattatagattatgcatcaaa

SEQ ID NO: 4976 - DNA, 311 bp, Aspergillus oryzae
agcagcgattcgcccgtttacaggccatcacccccgagaactgaattattactttctcatcttcggttgatggagaacggttggtggacgtgaaggattgctatggttttacgtctcttgcttaagcccttttttttgcatttttactaccccctcatggactgattcgacatgttcctgttgacgttgatattcttttctttccctcctatctttgtctatcatctcttctgccacatagacttttttacttttcttttctcttcaacgaaaatatagatttctgctgatgaaccggatatatcacagat

SEQ ID NO: 4977 - DNA, 284 bp, Aspergillus oryzae
cctcgtgccgaattcggcacgaggcaacctacaactacaaatcctttaccatgtgtatcgccttcttttccaccgctcatccccaatatcgcctcatcatctgcaacaaccgagacgaattcctccaccgaccaacttcccgtgcagactggtggccgtcccctcattcccacgtcctcagcgcccgagatcttgtgcgccccatccaccccacctggctgggtatcacaaaacaaggccgcatagccgtgctaacaaattaccatgaagacacctgcgcaaaa

SEQ ID NO: 4978 - DNA, 310 bp, Aspergillus oryzae
cggcacgaggcggcacgaggaacaggcatcttccccctcaactatgttgaaaagctacctgaccccacagttgaagagttacagcgcgaagctcagatggaaggcgaggtgttcggccagataaagaacgttgagaagctattgacactcctcagcacgcgtagtaccgaaccaaacgttcaggataatgaggaaatcacggccctgtaccactccactttggcaattcgacctaagctgattgagctcatcggcaaatattctcaagaaaaaagatgaattcacccaactcaatgagaagttcattaaa

SEQ ID NO: 4979 - DNA, 319 bp, Aspergillus oryzae
cagtgaacaatttctataccttactctcgcgttggaacaacatgcccagtcgtgcgagctatagttttgttcctctccacccaggagcccaagaaaggccaatggatatccataatacggaagatcgacgcgagattctcctagcggcgcagctctcccggattgtgtgccggatgctggaggttgaaggattccgaaagttggaacgagacttctacaacatcaaatggaagcagatctctcaggagacgcacttgcgtttcctaaacgagctagggaatattctcctcacacttcgctggcgagtttcctggtggaa

SEQ ID NO: 4980 - DNA, 275 bp, Aspergillus oryzae
caaatccccaaactgcccaaaatggtctacacaatcgttgtccacatgcgcgcgaagcccgacgaggagtctatctccaagctccacgcgaagcttttggaggcctcggccgtttactcgaaggataaggagactctctcctggttcgttatgcagtctgtccatgataagcaggacttctgtatcgtggagcgttatctcaatgaggggtctcagaagtatcaccttgagaacccttactggaagacttttgatccatatgtcattcctctttt

SEQ ID NO: 4981 - DNA, 274 bp, Aspergillus oryzae
gggtactttgtctagatccaccaagatggtttgcttcaggcatgacggcgagccgatcgggcgactgggtgaccctcaagcacgcggagaaccccgatgatgccatgctccagtggtcgagaatctctcgactgggtccgatttaagagtggaggcgattggcttcgcacgaacgagcacggaaagctcaatatgaagggctcagccgagtatgcaattcttatgcacaatagcttctggcatttgcctcattagggcttcttgattttggaaa

SEQ ID NO: 4982 - DNA, 276 bp, Aspergillus oryzae
caaattaattccctcacaatgctctacctcgttgggttgggtcttgccgatgagactgacattactgtcaaaggcttagaggtggtgaaaagggcggaaagggtctacctcgaagcatatacaagtattctgctcgtcaacaaagagaaactagaagctttctatggacgtcctgttattgaagcagaccgtgaaaaggtcgagagcggaagcgatgagattctcgctggagcagataaaacagatgttgcattcctagtcgtcggcgatcctttt

SEQ ID NO: 4983 - DNA, 284 bp, Aspergillus oryzae
ctcttataacggaacagactaactcaattgtttgattcgagaatctcgtccatcatggtcaaagctgcggtacttggagcttctggtggcattggccagccactgtctctcctgttgaagacctgtcccttagttgaagagcttgctctctacgatgttgtgaacacccctggtgttgctgctgatctatcccacatcttgtctatcgctaaaatctctggttttctgcccaaagatgatgggctgaagcaggcccttactggtgctaatattgttgtcatccc

SEQ ID NO: 4984 - DNA, 293 bp, Aspergillus oryzae
ccatgttatcgattaccttttaatttttcttgtatatttccttcccccttggacgccgtgggtcttcctgagtcaacccatcctttctcaatgatcggatatggcgttcaacttcaactggtcgccgctgatggcggacgcgagtttctatactcgcgctcaagatctcttaactgccgctctgaataaatcgccgaaacctccgattatcgtcgacgatatcatcgtaaccgagctcaacctgggttccatcccgccagatctggaaatattagagattggtgatttggcgg

SEQ ID NO: 4985 - DNA, 263 bp, Aspergillus oryzae
gctagtaagagatcgcaagagcaacgaaagctggctgttatggatttgcggaatttgcaactatacaggatgctcaagcggccgttacacgtctgaactcgttcgagaagttcaccatatcatcaaggccagtgcttgtgagctacattcacgctggtgtatttgttcccgtgatcaatccctcggcgcggacggagaggttcaccttcagtcctctcaataacccatccttaaagcttatgtactgggatgaggaggcttac

SEQ ID NO: 4986 - DNA, 276 bp, Aspergillus oryzae
ttggtcacaatggccactgatttcaagacggttcttgcccctccaaaacgggctaattccgactatccgttgattgattccgacccgtaggattgctgaaatcatagaataattaacaagtgctcactgcttccaggcacctgcgacgagtttttggatatgcgagaccttctgattatgctattgctggcggagcagctgccgcttcgccactagcattctgggccatggaaagggtgagcccatctcatgttggtagaaggaggttttcgcccc

SEQ ID NO: 4987 - DNA, 281 bp, Aspergillus oryzae
aaggaattagagcggttaccacagccagaaacggcgtgggtgcctttattttaccatgcaagcgtttggactttcactactgtgactgggctggaagttcccgtggaatggtagctttcctgaagaacactcttccctccttcgccaaagccaaccctcagattgaaatccgcgtatcgccacgaccacacaagcaccccgtaatcaagggccactacatcaacggacgtgagaaggcagtctgtgttcgcaacctcgagcccgaacagatcttccagaaa

SEQ ID NO: 4988 - DNA, 298 bp, Aspergillus oryzae
cggcacgaggatccaaacaactacctctccaaccaaccaatttcaattacatccgcaaccaactacttcctacactacttcacacaaaatgtccgaccagaccttccacaccaccactcaggatatccgcaagccggaatccaaggtttcccaagcccaccagggaaatgtccctaagaactcagatgtctcagctatgaaatccctcctcagcgagaacaccgacaagaagcagcagattgaacagaccaagtccaacctgcctctacctgatcagccaccagtcgctagtgactgg

SEQ ID NO: 4989 - DNA, 311 bp, Aspergillus oryzae
aaccctcagtcctccacatcctcttacttctcacctatcgaaccctttcactcctctagcttcgattttgtttttctccactctatcaaattaataatgagttcgcccttcgatatcaacggtggtgcctgcgtcgccatggtaggcaaggactgcgttgcaattgcctgcgatctccgactcggcatgcaggccctgaccgtctccaataacttccccaagatcttcaactacagcccatcgaccttccttggcctgaccggcctggcgaccgacgtctcgaccgtctcagatctcttccgctacaaggg

SEQ ID NO: 4990 - DNA, 300 bp, Aspergillus oryzae
acgcggttcaccgtacgcgactgtccgagactaaacgtattcaccaacgtatacaaagcctaagctgtcgaaatggctatgaacgcgattcagctcggccttcggctgtgggagttcctatggaccctgctggtcatggccctcgttggtaacatgatcgccgattcatttagcggaaaccctgcgaccgtcaactatgccatgtttgtgtcggcattttccatgttctcgctgttctacttggtgccagcgtcctttaatctcgactgggcgatccacccgatcatcatgatccgtctt

SEQ ID NO: 4991 - DNA, 256 bp, Aspergillus oryzae
aaagaacagcaatggtttgccgaggccgaagatcgctttcccacctcacacttcgtctccaaagatccggatggccaaatacgtcttaccgatcgatatggaagtaccccattgagtataacaaaaggtctcgggatcttttttgacaaagccggggagaccaccccaatcgtgttcagtcagttcattctcaagcttaccaccatgcctgctgtgataatcttctttcatctacgcccgatcgaaacgccgtcgg

SEQ ID NO: 4992 - DNA, 287 bp, Aspergillus oryzae
cctcgtgccgcgctcgcgcaacatttgaggacatacgtccttaagaatcaaaatgccgccctcgcccggcatgacactttccgagtcgcagtctccggcggctccctgcccactgtcctagccaaagctctacttgcgcaaggcaacgggacccccgaagacaccgcgcagttctcgaagtgggatatcttctttgccgacgagcgcgccgtgcccctcgaccaccaagacagcaactacaaattactgaaggatgaactgctgagcaagatccctacggaactggg

SEQ ID NO: 4993 - DNA, 251 bp, Aspergillus oryzae
taacaataacagtgcaagtttaaggaagaaagaagcaatggccagcaaacccttcgctatcatcgctggtgtcggtccaggaactggagcctcaatcgcccgcaaattcgcccaagcctactccgtggttctactagctcgtaacccggcgaacttcacgcccgtcgtcgacgaaatcaacgcaaacggcggccaagcagcaggtattagtgctgatctatcagacacaaacagtgtcaagtctgcatttt

SEQ ID NO: 4994 - DNA, 279 bp, Aspergillus oryzae
caagagaatcagtcaaacaacaaaccatatgcctcaaccgacgattcaagtggaaaagctgagttgtcgtcaccagcctcaactggggaaaatttgtcgaaacattctaagaaaaggcctgcggaggatgggccttttagcgaatccaccgaagagtcaaacccaacttccacacagaagaagcagaaagccgaagataaccctaagtctaccgaaacatcgtcttcacaagtcagtgatccttctactggatttcagtctctccctttcggccacaaa

SEQ ID NO: 4995 - DNA, 296 bp, Aspergillus oryzae
gcgacccgcaaacgcgacaagctttactacaggtatccaggacctggaggagaagggtatctggatgttatcaaccgacttagagcagtgattgtcgaggttgagcgaatgaccgatcatgttttgttagtcactcaccgagccgtagcacgcgtccttctggcttacttcaagggcctcaaatgcgatgaggtgacagacttagacgtgcctttgggaatgttgtatatgcttgagcccaagccatacggggttgagttcaaagcatatcgctacaacccagacaccgactggtt

SEQ ID NO: 4996 - DNA, 265 bp, Aspergillus oryzae
ggcggttaccctcctcagggtcctcctcctggacaatacgcacctcaaccccaaatgggatacccgcagcaacaaccagctccacagcaggagaaaaagagtcacggctgtcttggtgcctgcctggccaccctttgctgttgtttcctgtgtgaagagagctgcgaatgctgtatcgactgcatcgaatgctgcgaaatgtgctaagcttcacgacccgtatatgacctcaatgatacgataatacctacccatcgcgtgcggg

SEQ ID NO: 4997 - DNA, 342 bp, Aspergillus oryzae
cgcggtcgcgccggatctgacgatttcgcgttgcaaaaccacgtccgtcatctgatgcagtccaataccattactgagggcactgtgttgcccgatggaaacatgaaaggtctgttcatgaacgctgggcctcagcgcactcaatctctcacggctgcccaactgcacgctcttaattacaacgttccactttctggaccggcaggcatgaagcgtgcgtgctgcggtagtgaagcgagaaagattgcactgaatccaagcgtgcgcgcggattacttaggttagagattcgttcgctggacggaacttttatgcacgtggacaggttcgccttctgttctg

SEQ ID NO: 4998 - DNA, 425 bp, Aspergillus oryzae
caagtcgacaaagcagtcaagatgcctcgcggacctaccaagcaccagaagcgccttagtgcgccttcgcactggctcctggacaaaatgtccggaacctatgctcccaaggcctcccccggtcctcacaagctccgcgactgccttcccctcatcgttttcatccgtaaccgtctcaagtacgccctgaacggtcgtgaggttaaggccatcatgatgcagcgtctcatccaggtcgacggcaaggtccgcactgaccctaccttccccgctggtttcatggacgtcatcggcatcgagaagaccggcgagaacttccgtctcatctacgacaccaagggccgtttcaccgtccaccgtatccaggctgaggaggccgaatacaagctgtgcaaggtcaagcgtgttcagctcggcaagggcgg

SEQ ID NO: 4999 - DNA, 433 bp, Aspergillus oryzae
tgccgacataccaagtaaattgattaaccgaaaaaccatccaggccatgatactcaatgaacgtccgaacagtagcttaaaacagcaaaagctcaacaaaaccggctcagtaataatccaacgaagcaataaacagacacgatagggagagaagacagtaatgacaaagcaatttcaaatccgatgaatcagcagatcacacgagggatggattgacgccccttagatgcgctcttctccgagccgaggagccccccctttccagtcaagccgctcatagtagcggaagacaagatcataaccatccaaatcgtgaacgatgcgatccacacgacgatatccttcgatgtgctccacctgggacttccgacgggccgcctgccgttcgatgtacttggcctcgccgatgccgctgagctcggcatcactgggg

SEQ ID NO: 5000 - DNA, 234 bp, Aspergillus oryzae
ttttgaatttccaaacccacatcgtcgcatccagaaatccattgaatccacattgaatcacagcaccacagacgcgggtctagacactgttgctgaacttctcttgcttacacttccattaatgcgagccctagaccagatcttgatgaatccgtctaacaggcagccactaagggtgcaagtgactgtccgtaacgcgaagacatttcagattcactaccctggccaaagctt

SEQ ID NO: 5001 - DNA, 444 bp, Aspergillus oryzae
gacaaactagcggatcgtcactacaatggcttctccaactcgatcctttggcctctattgcactatcatcctggtgagattgtgtttgatgagggtgcctgggatgcctaccgtgaggcaaatcttctattcgccaagaccatcgctaaggaagcccaagagggtgacttggtctgggtgcacgattatcatctcatgcttcttccggaattgctccaggagcaacttaatctcctgggaaagaagaatattcggattggatttttcctccacacaccattccccagcagtgaaatctacagaatcctgcccgttagagccgaacttctgcgaggtttgctgcattgccacctaatcggcttccatacctatgactatgcacgtcacttcttaagcagctgtgctcacatacttggattggtgacaacccctagcagcgtgaaa

SEQ ID NO: 5002 - DNA, 404 bp, Aspergillus oryzae
gtgatgttgagcagatgttgagctccatatatttagccgcctcaagaacgcaccatggcgtatcccgttagatacccccggtctgtgtcttgtactcagtccataatctcgaggatatgaagatagtgataagcagggagtgtatctgatggggcacttgagccacgagaaccctggcaatggacgagagaaagcctagacgacccaccgcgtcagctaatgccactgcttccattatattgggacatgtcttggctgaagaaaggatgctcaggatgccgccgaggatacgccgaacgaactcatattttctgatggacgcacggataggacgtgatcaagctgatattggctgtaggacatgtgacacggttgacggtattggcttcatttgcaacttgggg

SEQ ID NO: 5003 - DNA, 415 bp, Aspergillus oryzae
cacatgtggagcaagatatcgaagattctcgagaactcccaaacctgtccctacagtcccccaaatgagattttggtccgaaagaaataaatggcggtagcggatatgtactcttgtgtcgtctttattttcagcttgaacgtaaagccagccaggtacctcaccattcaaagatcaagtagtgtccgatcattgaatctccctccgagagtggcaccacgaaggcaactctggtaatcgcgcttctagagaaccaccctatgccatcgcatacttcctggtccactcccgtgcgatttcgtcataccgtgcccggtcattcttgtactgttctgcgatacgaccctcgacagcatcatcaggcatgggctctacgagcaagctgacgcgcgaactcaagcactgccgcgatctt

SEQ ID NO: 5004 - DNA, 372 bp, Aspergillus oryzae
tcccagaatccctgtcatagaaacagtacctcccttcttcacgcaacgcagagaatcagccaaagtcgccgtacccacaagctccagcaccttgtcgaaatattgacccgatgtttcggcaatctgttgagaaatggccccgttatcgatccacacctcgtccactccaaaatcccgtaacaacgcctctctttccgtttttctggtcgttgacgccacaaacgccccatgtttcttagcaatggccgctgccgccaggcccaccgaggacgttccaccgcgaatcaacaatctatctttgggtctcaaggtgagtgtccttatcaatgaaccccaagctgtctgcagcatctctggtagcgcccccagcac

SEQ ID NO: 5005 - DNA, 415 bp, Aspergillus oryzae
cggcacgaggcacaatcccacaacaacaacagcaacaacccctacaaaccaacaaaagaacccaagcattcaaaccacccaaaatgaccctcgagatcaactccgccctctccctctccatcctcacctccctcggcggagtgatcggctacgcacgcaccggctccgtcccctccattgcagccggtctctccgtcggcgccctctacctctacagtttccagcgtctgcgcacgggccagacctacggtgacgagctgggtctcttggcctctattgttctgagcgggagctcgattccgagggctattaagacccggaagccggtgcctattgggttgagcttggtggctatttatgggcttttggtttttgggaaggctgttttggggaagaactgattctctctctctcc

SEQ ID NO: 5006 - DNA, 294 bp, Aspergillus oryzae
cggcacgagggttgctttcccccctcagcacatgggtaacgtgctcgctgaatggctcagcaagaaggatgttcagcaatgtcacgttgccgagactgagaagtacgctcacgtcactttcttctttaacggtggtattgagaagcagttcgctggcgaggtccgcgacatgatcccatccccaaaggttgcgacctacgacctggaccccaagatgagcgctgaggccgtcggtcagaagatggccgaccgcattgctgagggcaagttcgagttcgtcatgaacaacttcgc

SEQ ID NO: 5007 - DNA, 356 bp, Aspergillus oryzae
agaagatcctcaagggcctgggcgccaacaatgccattgcacagggcgcctggaagcactacgacgcggcaaagatggccggactccccacagcagtgcaggtcgtcggcagaagatggcaggaggagaaggtgctcggatacatggaagcagtggagaaggcactggaacagtaccgggatccggcgaccggggagagcggcaagtatactttaattgaacttgactaattaggttcggtgaggttacattgaatggttctaggatttttgagtcaagctttcgggtttgacaggttcggtcgtaccgagggtgtcagtgcttttgccgcctatcacttatagtataagtgctgg

SEQ ID NO: 5008 - DNA, 363 bp, Aspergillus oryzae
gcctagacctcggccatggacaacctggccaaatacgatgtctttggcgacagcctcagcacaaaaggtgataggatctctcgcggagacaaactttgcaaatgccagtgcccaagcggctttcactaaggacgccatcgtgatattctcgggaggagatattagtcgtgtccgttttatcaccttgactggacgtgcttcatgtacaggcttctccacatgcgtggtggccatctgctttggcttcagagcggtcatctctgaccctttgagaatgctcctccaggcttcaaggccttcatccgttgtgattagcccatacagcgtgaatgtggtcggagaatggcgcagttgggtcagggg

SEQ ID NO: 5009 - DNA, 343 bp, Aspergillus oryzae
cggcacgaggcctcgtgccgaattcggcacgagggtggcttcgggctcccagctggctcttgtttcggccatgcaggctcggaattctgcccgcttcactcttctgggctcggttgagagtctccaggacaagtggttctccgctactgtcaaggctcctggtgatggaaaagagtctgagactgctaaccgtgagtttgccaaacagctgaccgcctggaccttcaaggagactggagtcctcaaggttggcaagattgaacatcatctggccgagggtggtgaactgaaccctaagatctaccggatcaagaacgagacagtcttcagcattgaggtctcc

SEQ ID NO: 5010 - DNA, 399 bp, Aspergillus oryzae
cccgaacgacatttttgcgggtcatttcctcgacttgtttgcgttgcccgctgttgctcagaaccgccgtcagaatgccttcggaacacggtcacagactctacgtcaagtaagttaccacaactatttcgtgtcgcgcctatccggaaatgatatatgtctatcaagaatcgcttgcgaggaggatggggatacggatgggaccacgacagatgatcagagcagaggattaatacgaattattctttaggggacgtcacctgagctaccagcgctccaagcgccaggtcaaccccaacaccaggtaccgatccgcatctgatatcgaaaggaagtttgggacatggaatctgacatcggtgatatagtctgatcaagatcgacggtgttgacaacacc

SEQ ID NO: 5011 - DNA, 392 bp, Aspergillus oryzae
cctcgtgccgaattcggcacgagggcctcacaccgccgtaacaaatacgagagcactaaagatggctttgctagttgacaaactgcgaccacgctcgctcgaagctctctcatatcatcatgaactgtccgcacgcttgaagtcactggcacaaagtggagatttcccccatctactcatgtacggaccatcaggcgcaggcaagaagacgcggacaatcgcgacattaaaagagctgtacggtgcgggtgtggaaaagatcaagatcgatgccagagtctaccagacgacgagtaaccggaagctcgaattcaacattgtatccgtctgtataccatctggagattacaccttcggatgtaggaaactatgaccgtgttcgtcgtgcagga

SEQ ID NO: 5012 - DNA, 331 bp, Aspergillus oryzae
agcgtcatgacagagcaggaacacgaagtctaccgtcacgccgacgctgatggacactttcggcgtaaagcttcggtctttcgctcgtccgtgtccagtgatcccgcggctgaattccctgccgaaaaagaccgctacgtcttgtacttggggtacggctgtccatgggcgcatcggactaacatcgttcgatcactcaaaggtctcgaggagataatccagctagtggttttggatcctgagctggggcctgatgggtggttcttctcaggtcggtggggttcggcagagaaggatcctctgtatgggttcacgcaactgagacagcttt

SEQ ID NO: 5013 - DNA, 309 bp, Aspergillus oryzae
gttgacggtcaaattcagcatatttgacaaggagatttgaagtttgctgttggttttaggaagactagtataccgacaagatgttgctttctcgccgtgcgtgctacaagtgtggcaatattggccactatgccgaggtgtgctcttcgtctgagcgtctctgctacaactgcaagcaacctggccatgagtccagcagctgcccccgtcctcgtactaccgagaccaagcaatgctacaactgccagggcttaggccacgttcaggccgactgtcccactctgcgtatcaatggccgcgaatggccgt

SEQ ID NO: 5014 - DNA, 330 bp, Aspergillus oryzae
ggtgacaacaccaacggctgcacctccgctggccctcacttcaaccccttcggcaaggagcacggtgctcccgaggatgagaaccgccacgtcggtgacttgggcaacttcaagaccgatgctgagggtaacgccgtcggctccaagcaggacaagcttattaagctgatcggtgccgagagcgtacttggccgtactctcgtcatccacgccggtactgacgaccttggccgtagtgaacacccggagtccaagaagactggcaatgctggtgctcgccccgcttgcggtgtcattggcattgctgcttaaacacatagttctagtcaa

SEQ ID NO: 5015 - DNA, 169 bp, Aspergillus oryzae
aggtgagcgaggagtttattcggaagtggccgtgggtggttgggggttgtgcggagttgttggtttcgacgaatcggtggcgcgcgatgaggggggagaaattgatttttagatatctttagccttgtttctttatttctttataatgaaatgaatgtacggtggtttt

SEQ ID NO: 5016 - DNA, 329 bp, Aspergillus oryzae
tgctcctacaaaaatcacaatggaattcgtcagcaaacttgccgaaaagttcctcgacaaggacaagtccagcggcagccaagaaggctatggcaaccaaggcggctacggtggaggtgaccagggatatggctggcggctatcctcaacaacaacagcattcaggccctcaagtgccccccccatggatcgcccggtgggatggggagtcacagcgctggttctacgtgaacgagcagaccggcgagaggacctggaaccacccaggccagggcggtggctacggacagccgcagccttcgtacggtggccggtgcaccttacggggg

SEQ ID NO: 5017 - DNA, 361 bp, Aspergillus oryzae
cgctcgtcactgccgcttgcaccccccacagtttggaaccccggccctccaatcccctcaattgatacttccacatagtccaagatgggtatctccgactttttctccgacattatctcctccttcagcctccccgaggcccaggctgaggctcccgctgagaacgttgagcagcccagcagccaggagaccgagaccgaggagaagcccgctgtgaccgaagagtcgaatagtgaagagaccgccgaaaagactgaggagtccgctgaggagactcctgaggagcctgccgaggaggagcccgagcaggaggaggaagaagaggaggaagaggaggaggaagaggaggaggagcctgagg

SEQ ID NO: 5018 - DNA, 331 bp, Aspergillus oryzae
ggagttatgtcggtgcctatcgactaatcgtgcgacatttattatcgcgcacttccatttgtccttcggtgagtttaaagaaaatggacgactcgcgataagtcactagccggaatccgctgcgccgacaggaactgtacccggccacagttctctcagataattatgttcttctctcgcttgtataggtctttcagaagtttcagttgattaacgcccatactctgacgaggcacgctgcttggtagatcgactatggccttcctcattaatgccagaccgatatgaccaaagaagccgacgatcctttcagcagaagatttgagcatgg

SEQ ID NO: 5019 - DNA, 336 bp, Aspergillus oryzae
cctcatcctccacacaccgtcaagatggcatactggaaagctgctggtttgacttacaaccgctacctggccgttgctgctcgcgcggtccgcagatccctcaaggagacccctcgtctggctgctgagcgccgtggccagatggacctgcgttttgctaagtgggagaacggcaagcagggcgaggttcgctccctcggtgaggccaaccaggaggccgccgttgcccatgccgagaaatagacgcttttcgaaatcactcgcatgcgataatatgggatattttttacgagaagggggttacggttgatgatgttgtggtgcaggaaaatgatt

SEQ ID NO: 5020 - DNA, 349 bp, Aspergillus oryzae
cccggttctcacggaggacacggcactggagttttatgcactgaaagggcttcctggcccatacatcaagccatttcttgatgttttgggccatgaggggttgaataaaattctcgattcgttcgaggataaatcggcagatgcgatatgtacattcgctttcagtcacggccctggctcagagccaattttattccagggaagaacgaagggtgtaattgtcagaccgagaggtccatcaaactttggttgggatcccgatttttgaatatgaagggaaaacgtatgctgagatggacaaggaggagaagaaccaaatatcgcacaggtataaagctttggagaaatt

SEQ ID NO: 5021 - DNA, 343 bp, Aspergillus oryzae
aagcgatgaatgggccgatgcgcaaatgcccgtggacggcacgcagggctgtatccgggccttcacgcagctgaaaccgcagtaccccaagatgaaaatcattctctccgtcggtggaggcggcaagggaagcgagaacttcgccctcgtggcgcggagtcaatcgcgtactgagacatttgtccgcacggccagggcgctggtagaccaattcggcctggacggtctcgacattgactgggaacaccccgccgacccacaacaaggcatggactacgtccgactactagcaaagctgcgggaagcactgcctttgcctcgattcgtattagcaacgtgtctt

SEQ ID NO: 5022 - DNA, 377 bp, Aspergillus oryzae
cgagcatgtacaactgttgaaacaggcagcggccaatttggcgacagagacccacgcctcgccaaaatgggagttcattgaagtgcgaaccccgcaggaattggatagatgcgatgcgcttatcttacctggtggcgagagcaccactatctctcttgtcgcagctaggtctaatcttttagagcccctgagagatttcgtaaaggtccatcgcaggccaacttggggaacctgtgccgggttgattttgcttgccgagtccgccaacccggacaaagaagggtggccaagagcttatcggaggtttagatgtgcgccgtaaataggaaccactttggtcgtcagaccgaaagtttccaagcgccattggatctgcc

SEQ ID NO: 5023 - DNA, 321 bp, Aspergillus oryzae
ccatggcactcggtatctcgtgtgctggaacgggcttggacgaggccatcgacctgctcgagccgatgctcaaggattccacggactttgtgagacaaggagctctgatctctctggccatggtgttggtacaacagaacgaggccatgaacccacgagtcagcactcttcgcaaagccatgatgaagatgattggagatagacacgaggatgccatggctaagtttggttgcgccgtcgctctgggtatcatagatgctggtggccggaattgcactatcagcctgcaaacgcagactggcaacctcaatatgcctggaa

SEQ ID NO: 5024 - DNA, 327 bp, Aspergillus oryzae
gttgcttatcaaacactcattgatttcaactgttcttgttgttcagaatgtagtcaatgctgtcatcaagcctcccatggctaagatcgccgatgtcttcggtcgcttcgaagcgttctgcgtgtgcatcttgatatatgttctcggttatatacaaatggctgcttcgaccaatgtccagacttaatgcatcggctcaaatattctattccgccggctcgacgggcttacagatcctccaacaagtgttcattgcggatagcagcagccttctcaacagggcattccttgccctccttccagagtttccgtttctggttacagttt

SEQ ID NO: 5025 - DNA, 370 bp, Aspergillus oryzae
gaagtttgtgacgtctgcgtataagaagcaacaggaggaactgcggaggattgaagaggaggaggcggagcgggagaggcaggaggaagaacgacggaaacagaatggaggtaccggtatggttgatttctacagggacatgctatctcggggcgaacaacagcatgaagctgttatgaaggctacggaagaggctgcacggcgggtgcaagctggagaagccccggaagaaacagaggagtccaaggagaagacagaggcgcagaaggccgaggagctcaatgcgcggggtgcccatattgccgtcaacgacgaaggacaggtcgtcgacaagcggcagttgctgtctgctggtctcaatgccggcccc

SEQ ID NO: 5026 - DNA, 308 bp, Aspergillus oryzae
gtttcgacggtgacggcaaccgctctcacttataaactcgaagccaacgagaaagcttgtttctacaactatgttgaccagaggaacgcgaaggtcgccttctacttcgctgtccaatctggcggctctttcgatgtggattatcaggtggtcggccctggtgagaaagtggtcttagatggaaccaaagaacgacagggcgacttcgttttcacggcacagagcatcggggaatatagattctgcttcaataatgaaatgtcgactttcgccgagaaattggtggattttgagattgcggtcgaaaa

SEQ ID NO: 5027 - DNA, 316 bp, Aspergillus oryzae
gaaattgtacctaccatccacacatatacccaacgaggcaatgcgatagtccttcaaacacgacaccccgcccccaatcatcttcccgccgcaaccatgctcttcttcagtttcttcaagaccctcacaaaccagaccgtgatcatcgagctcaaaaatgacattcgcatccgcggaacactgaaatccgtcgaccaatacctcaacatcaagctcgacgatgtcgacgtcctggacctggacaagtaccctcacctgtcatccgtgaagaacatgttcatccgtggtagcgtggttcgctacgttgttttacccc

SEQ ID NO: 5028 - DNA, 358 bp, Aspergillus oryzae
cttgcgtgaattaaatccatccacggccctacaacaagttgccaatttgtcagggtcattgcaaagtacacagcagttggtggagactgttagggttggcttgcattctctggaaaccagatacaacagcctcactacagagccgttggcgaggaacatggttgtcgcgctgcaggagatgtacccctctgctagtcagttactggagcaatattccgggttgaaaacggtcgttgataacctgtgtcaaagccaaaacactgtcatcaggcaggcccagcaggaagcagctttgcgccttgatgagataaacaagctgagaaacgaccatgccagtctctcaggatcacttgcacct

SEQ ID NO: 5029 - DNA, 341 bp, Aspergillus oryzae
ggatgtatatcggattaaaactaataactctcccttccaatacttcaattctttcttcattcgtttctctatttcacatctttattgctcttggattacggagcactttgaattctggtacgggacggaggagatcactttgggacagcaaaccgcggattcgcgaaaccgttcatatgaagaaaagggaattccaaaaccagaggggggggcagcctagttcaattttttgtgttcattattcccaattgttttgtttcttttacctcctagctttggctccctcggatcgtcgaagaccaggctggcaggatgacgataggattgcaagcaggactgca

SEQ ID NO: 5030 - DNA, 333 bp, Aspergillus oryzae
ggagtcgagtcggtatatgattcaggatctggcgctgccatactccacggccgagtcctttatcgattacacgagcgagaagttgggcatttggcccttgtggctctgtccgctgaagcaaagccccgcgccgacattccatccgcatgagaccacggtgaagagtgaaggcttcacgcctggccagatgctgaacattggtgtatggggattcggacccaaggatccggacacatttgtcgccgcgaatcgggacctggagcggcgattacgggagttgggcggcatgaagtggttctatgcccacacatactatagccaggaggagttttt

SEQ ID NO: 5031 - DNA, 313 bp, Aspergillus oryzae
cctcgtgccgaattccttttccgttcacatattgacactcatcgggaaaaaaaacataaatttaagcccaatcgaaaataattaaacttaatctcgtttaacctttattgatatgtactacgtatcttatttacttccggtttactaaggaaactgaatgcacctgtaaaaattacaggtttggaaagtagtgacatggcaaagtgattacagtagggactatgaggttaaaaaccatatggaatgtcaaaaccgttctgataaatacatctggtctccccatgacgcctacttctataaaggactatctgaa

SEQ ID NO: 5032 - DNA, 341 bp, Aspergillus oryzae
ccaccgtgaacaagttttaccccatacgtacatccaaagatggatacttccaccaccccgtccgcaccacagcgcccgcacttcaagcggcctgtttacattcctcctgtcaagggcaatattggtaaatggtatatttcacttattccctactttattcatcatagaaagaagaaaaggtactaacatatcctgaatccaggtacctcccaaccatggggatgatagccctcggcttcggcgtctacaattactacaacgcccccactcctgcctacgaccccgaggaagcagaacgtctccaccgcaacaaagccttgatggatgcatacggagacaaa

SEQ ID NO: 5033 - DNA, 520 bp, Aspergillus oryzae
cggcacgaggggttgcctccgcagggacccgggttattgctcgcgcagcaaaggtgcaccagacccctgtcgtggtcgtgagcggcgtatacaaacttagccctgtgtatccgttcgatttcgactcgctaatcgaatatggcgactccagcaacgttatcggctacgaggatggcgacttggtggatcagatcgacgttcaaaaccctctgtacgactacgtcccggcagagttgatcgacctctatatcaccaatttaggaggccacgcaccgtcttatctttaccgtattgtgtccgaccactatcgcaaggaggacatcagcttttaagcgccttgttgaagaggaaaaaagcacgaaaaataaaaaaaaggaattgggtattagaaaagcatggttacatacgggcgtaaggattgtaatagacaaattatgagggacgatacccatggggacattaaatggactcaagacacctacacacacgtagttacccttaaatggaatagtaatgaatt

SEQ ID NO: 5034 - DNA, 465 bp, Aspergillus oryzae
tggcctgcccaaatgccgaccacgatggagcacacatgccaatcgacctgccccatgaaggccctggttaatcaaattggatgtgagatgtggcattagcctgacaccttcggcttcactcccgtaaccgattttgcccgggacggacacctaacgattctcggatgttaacgtccccgttcgctccacttaaagcagtttgacagatccaccggcgtcatcgtatcattcggcgtcgtcgttaattgctcctgctcaccgaggctgccttctgctccgccgaggaatgactgtctaggcctttgacgcgacaggcagtggttgggacgatgctccaccgcgtatatgtccagcatccggacgagtgcttaacttttgtgctcgtctctgggaacccggcggaggatacggaggcatgtaagacattcctgtatgcgttgtttatgccggagagatgtgtttccg

SEQ ID NO: 5035 - DNA, 408 bp, Aspergillus oryzae
aaaaccctcaccatgtctgacgaacagcacgtattcgatgatatccagggtaccgattccggtgcctctgccaccttccccatgcagtgctctgcattgaggaagaacggtcacgttgtcatcaagggccgcccttgcaagatcgtcgacatgtccacctccaagaccggaaagcacggtcacgctaaggttcaccttgtcgctctcgacatcttcaccggcaagaagcttgaagatctgtccccctccacccacaacatggacgttcccttcgtcaagcgtaccgaataccagcttattgatgtcaccgatgatggcttcctgtccctgatggacgacaatggtggcaccaaggacgacgtcaagctccccgatggcgagcttggtgagaagatcaacccgcatgtt

SEQ ID NO: 5036 - DNA, 384 bp, Aspergillus oryzae
caagcagcttcacgattagcgacacctccaagtcacaaccaattgcgcgaattaatcgttcttttcccgtttttctaatttactgattctgcgctacaagtctttgagctctatctcctaaattttcgatcgcaacaatggccaattcggaatctgcagtggagaagaccaagcagtctctcatgcaaaaagctcaagcatggggagagaatcctttcactccgacgctcctcgctaccttcattaccgcacagcacatgcgacccttccaagcactgccgatgctcttcccacccgtccttctgttcacgagctatgccaatcttcaaggtttcaagaccgatagcgcaggaatcagcgcagcctggtcgggactttaccttt

SEQ ID NO: 5037 - DNA, 270 bp, Aspergillus oryzae
gcaccatggctgccgctaggacgcttcgcataggtctcatccccggtgacggtatcggccgggaggtcattccggccggtaggaaagtgttggaatctctcccagcttctctcaacctcaatttcagcttcgtcaacctggatgctggtttcgataccttcaagcagaccggcactgccctgcccgacaagactgtcgagaccttgaagaaggaatgtgatggtgctttgtttggagctgtcagctccccgagcaccaaggtcgccggct

SEQ ID NO: 5038 - DNA, 215 bp, Aspergillus oryzae
cttgcattgtgtggtgttagttatctcttactgcatagttggcgtttaatgggctgcataggttctttccctgttttacttcatatgttgagcgtttccaggtatcatgtgtgatatacaagcaacaggacagcctgcggtttcttatagccgctacatggttgcaaccggagatagaccttagactatataaaaacataatattgtcttgtgtg

SEQ ID NO: 5039 - DNA, 374 bp, Aspergillus oryzae
gttgaggagtcgaggagtagggcgttggttgaggcttgtgcgggagatccggagaaggagggtaaggttgtgtggcatcctggtggacatttcttgccgagccagaggccgtacctggatgctgcggtgaggtttattagggagcagttggagggcggtaacaagaaggatgcggaagaggaggatgtgaatgatatggacttgcccttttagattatagatctagatttagaatgttttactttggcgtcccctatagactccacggaaactgtttcataatagacgattagcttggagaacgggcaatagccggcgcagcatcatgtatatagcatgcaaaagcattaatccatttctagatactgtctcgt

SEQ ID NO: 5040 - DNA, 480 bp, Aspergillus oryzae
gcttacagagtcgggagcttattgccgatggcattgaatctgtgatgaatggccagtggtatgatgcgaatgtgtcgctaccgggttgcgataagaatatgcctggtgtgttaatggcgatgggacgcacgaatcggcctagtatcatggtctacggcggtagtatcaagcccggatgcagtgcaaagggccaaaagttggatctggtcagtgcattccagtcgtatggccagtacattactggccagatcgacgagaaagagcggttcgatattattcgcaatgcatgccccggcagaggtgcttgtggtggcatgtacaccgcaaataccctggcgacggctattgagactatgggtatgaccgttcccggtagcagtagttgtccagcagacgatcctaagaagctggtcgaatgtgaaaacataggtgaggtggtgaagaatatgctcagggaagatatcagacctagtgatgttt

SEQ ID NO: 5041 - DNA, 257 bp, Aspergillus oryzae
atctgctgtagcagattgttctacgtttgattataccaattatgcctgatggcactctccatttggtatggattatcactcatcagagtatctcagttgacattttgtgtcggttgcttgttgtagcgatctcggcgaccgactacttgtccgaaaccacacacgcttacaaagatgaccgaccactaaagggcctaaagcctgtcatcattggtaattcggatcatctttgcagcttttcaactgattgcttaatt

SEQ ID NO: 5042 - DNA, 393 bp, Aspergillus oryzae
cccggtcgctccatcctcgtcgacaacaccagcgacctcaccctcgctagctcctaccccgtcttcctccgcaagggcatctccatcgtcacccccaacaagaagggtttctcctccgacctctccctgtggaaggacattttcgctgctgccgcagagggcaaggccctcgtgtaccatgagagcaccgtcggcgcaggtctccccgtgatctccaccctccgcgacctcgttagcactggcgatgaggtcactcgcatcgaaggtgtcttctccggcacactgtccttcctcttcaacaccttcgcccctgtgtctgggccgtctggcgcaaagtggagcgaggtcgttgcgaaggccaaggagctcggctacactgagcccgatccccgt

SEQ ID NO: 5043 - DNA, 364 bp, Aspergillus oryzae
ggcgaatcacacaaccacagcgtcgatttcactgggatcggaactgccaaacaaggaaacgaacccagtccgcgattttcagacccctttgaggtcccttgaatcgcgctggcttgacagtctggagtctcaacttccctcgaacatgacttcgcccgcctcactgtcaactattccgcagggcccaggatttttcaaagaaagaaaaaccgggacaggatggttttcagtataagtcggagagttcgtcggtgtctggtgacttctctactggtgtatatgaatgctcctattctgcgacgagcgatgatgccccggcatttgctgagcgacagctggacgaagaagatccttggaagggcgt

SEQ ID NO: 5044 - DNA, 373 bp, Aspergillus oryzae
cgcagacgtgtacaacattcccagctgtcgacctatgcgtctctgattttacagtacagacattctggcaacaccgaggtggggggtacgattagggacacagaatctatggatgcagatattgccttttcccctgtggtgttacgactctgggcacaagaatgcttgcaaattcagttgccctgttgactttcgttctttctctttttgggtgcaagctttctcagacgatggtccagttgactgtcatgtttgagcgtgctggtattatttttcttccttcttcctcttcctcttcttcttctacttcttctttctccttttcttcttcttcctcctcttcttactctgatttagctcttccttatcactt

SEQ ID NO: 5045 - DNA, 355 bp, Aspergillus oryzae
cctcgtgccgaattcggcacgaggctcagctcttctacgaacgctcgcgatcgctacaagttacagagtttttaactcttacccctcgctttcatactacaaccgcttttaagggcccgtttcatagtaaaaggccgagtttatgtccatcgaaaacctcaagtaccttcgaccccttcgccgaagctgacgaagacaccggcgagaccaagcagtctcaaaattatatccatatacggattcagcagcgcaatggtcgaaaaaccttgactaccgttcagggtcttcctaagaagtttgatcagaagaagatcttaaaggtgatcaagaagaagttcgcctgcaatggcaccat

SEQ ID NO: 5046 - DNA, 352 bp, Aspergillus oryzae
gtcaactgttcgttctactacaagatcggcgcatgcagacacggcgacagatgttctcggaagcatgtcaagccttcgtactcacagactatcctgatgccaaacatgtaccagaacccggcgtacgacccgaagaacaagatgaaccccagccagctccagaaccacttcgatgctttctacgaggatgtatggtgtgaaatgtgcaagtacggagagatagaggaattggtagtgtgtgacaacaacaatgatcatctaatcggcaacgtctatgcccgattcaagtacgaagaagatgcgcaaaaggcctgtgacgctttgaattcccgctggtatgcagctcgaccga

SEQ ID NO: 5047 - DNA, 279 bp, Aspergillus oryzae
cctcgtgccgaattcggcacgaggcctcggcgcaaagggatatctcagctccgtagtgacacagaatgtcgactctttccatccaatagctcattcgaaactatcaaccatcgaacttcatggctacctaaggtcggtcgtctgtatcagctgtcaaaatcaatttccccgagacgaattccagaagtcgcttcgaaaagcttaatcccggcctgggcagagtttttggccaagatggtcgacaccggggctctcaacacagataatccctgaggaaca

SEQ ID NO: 5048 - DNA, 302 bp, Aspergillus oryzae
gcgcgatggcgacagcagacacgatacagatgaacggagactaaatcgaggatacagagatagggaagaacgggcaagatctccgcgacgcgacagagatacgtatcgacctgaggataggaacaaggatagcgatcgtgaccgaaagcgtcctgagggtgatgagagagacggacgggacaagaagaagaaagagaagaaagaaaagaaaaacgccgttcctcagtcctcagaaccgatgattattgtgcatgtgaatgatcgtctcggctcgaaagcttcaattccatgtcttgcatcgg

SEQ ID NO: 5049 - DNA, 606 bp, Aspergillus oryzae
cgggccttggagctgggaaccctttcgctgcccttttcggcggtaatccagcaatgggcggcgcgaacccgcccagtacatcaactgcgacgggtaccggtcagactgagactgcacagagagcggctggagatgctgcagggggggatactaccacaggagagggtcaaaaccaacaaaatgctcagaatccattcgggctccttttcaaccccgccatgttcggggcacaaggcggtcaggtgaaccctttcaatccccaacaaaatcctttccttcgcgatcccgctttattatcgcagatgatgcaggcaatgggcgcaccaccaggagaagctggcgcaggtggacttggcgccaatcccttggcggcgctccttggaggcagtggatttggaacccccccttcacaggacaaccgaccgcctgaggaaaggtacgcagaacagcttcgccagctcaatgatatgggcttctatgagtttgagaggaatatcgaagcgctgcgacgagcaggtggcagtgtacaaggcgcagtggaatatctggtgagccatccttcttgagttcttacaccgatctgtaatggccgtgttggccaaacgg

SEQ ID NO: 5050 - DNA, 301 bp, Aspergillus oryzae
catggtactactggacgggcgctttgtgcgttttctgcttacagcaactgggatctgtatctacgaatgttttggatcagacagtgggccaactcctatcagactgagcatgtcggaacagatgatgttggagactacgctgccataacgagtttcaagatcccgtcattcaatgctgggggtgtcccacgaacctccacacagagtgccccccactttggtacacgggtagccacggggacctacggcgatgttaatgttgcctactatctcggtgtatatgcgattcttggattgcttt

SEQ ID NO: 5051 - DNA, 253 bp, Aspergillus oryzae
gacgacggaggcaagcaacctcctatctccgccgcaggccggaacgacggcgactgggtcaaccgggttggcctgtcccggaagcacattttcgatgcggtggacgccagcgtgagcagactgggcacttacatcgacgtattgcagatccaccgtctggatcgggacacgccccgtgaggagatcatgagggcgctcaacgatgtgatcgagagcgggaaggtcagatacattggggctagtactatggccg

SEQ ID NO: 5052 - DNA, 322 bp, Aspergillus oryzae
ccaagtggactgatggagcccaactacgaagtgtttgacccattgaattggctgctggatggtctggtcgacttgccatactcatattcaacgatttccgggatggaggctcaaggtatcgcatagccttgaccgacaatgttttgttttgctaccgtgctacgattattggcgttttaaggctggcttactgcatatcctgcgtgtatttgtatatatacccgaggagtctggtcgaactgtttgaataatgcattactactcttcgagaccacagacagggacgatttgcagacgatcacaatttacgaagaaatgattt

SEQ ID NO: 5053 - DNA, 276 bp, Aspergillus oryzae
gctcctggaggaggggttgttctgcccccgggtgcggatcagccagagaagctatccaagtccgccgccaggaacaagaagaagctgtgaggcgaagaagctaaaggatggtgaagatgggcagcctgcccgcagtccggaatcccatggggataagggccaccacgagcgtagtcgctccaaggccaacaactctgagcgcaagaacgcgaaccaggccaatggcgcgtcgcctgcttcgaccaagccgaacaataacgctgcagtagaagctgc

SEQ ID NO: 5054 - DNA, 379 bp, Aspergillus oryzae
agaaagctgtttcaacgaatcggcgatgcggtggattatcccgaccagaaagccacgaaaggccttctcaaaaaggcggcaagaaaggtcgggttcctgtgtatcgaggaagacctggaggttctcagagtcaacttggagcgcctcaagtcaaccatgcttctgatgcttaatgtaatcatgtatgctggacagctgcgtagtcgagcagaactgagcgtcctcgaggagcagcgaatgctgattcgcacacttgtcgaagagaagaaaacgaacgaaactcaatttgaacgtttgacgaaggctttaagagtctgccaaaattacggacaatcggctgaacaaaccccagccagtgacctgtcttaccaccacattt

SEQ ID NO: 5055 - DNA, 381 bp, Aspergillus oryzae
ggcgctcgtagtagcacaggcagggcttcgttgtctctccatactcaggtcagttggccacaagctcggacgtcaggtcgccgcgacggggttctgtcttcaccagttgagatcaatgccaaatctgatcaaggaatcatttctgctgctatagccaatgctgcagcctcggcattctcctcgcctcctcgaggatcaggaaatgttagcatgttggagcagcagactaccactccaacaaaaacccagtttaccttcacgtgtgaatccgactcgtcgaagggtatggcactgcaatcgcagagtccataccccgcatatcgttcacccaactctctacccccagctgcacagaaccagagagggttttctacacaaggg

SEQ ID NO: 5056 - DNA, 231 bp, Aspergillus oryzae
gctccccttggaggcaaccgccgttggtaaaactgctcgtaatgcccagttcagtcattgagcttgtattcccattgtcgcatcggtagatcttgctttccttcgcattcggtatccattgtaactctttacgggcggctgttcgttgaagtcacgatagactattatgcggtttttatttttctttcgcttttccgtttacaggttcctctgaactcatacggatacggg

SEQ ID NO: 5057 - DNA, 402 bp, Aspergillus oryzae
cctcgtgccgaattcggcacgagggaaccgcagaggaaagtgaaaaccttaacaaagcgaactgagcatattggaatgaagctgccaccgtccggcttcctaacaaacctcggcttagtatttccagcgaaggatatgcgagatgccgagggaatacttcccagagggaaacctgcttttccgatgtatgcagtgagcgggttcacgaccaccgcaagcctttataagattgagtactacttaacggtaaaggcccacttgacatctgcaagggatattgttattcgacagccaatagtagtttgccctcttgatcatgccgggtgtaaagaagaaatggaggctattgagcaggccgctcgagatgctgtccatgtgaacccagataaccccatgctgccc

SEQ ID NO: 5058 - DNA, 425 bp, Aspergillus oryzae
actttaagagcagcggagaaagaggaggaagccgctaaagacgaggaagacgacgacgacgacgatggttactgggctcagtatgacgctacacctgggaggaccccatcggtgaaaacgcccgctcctaatgcacggtcggggcttcagcaccaggacatgtcggaggcgtcctacttttcgcgatatgccgatgtgcagccggcgatggacaaccatgacccgtcggaagaacagccggaactcggaccatcttcgctgggcggagatctgctggccaacctccttaaacctcatgctgataatgaagcatccgagaacccactgcaacttaatggtcatggagacaccgacagggcattgaaccatccacgaccgtcatcggcctcctctaacagttcggaggctgttgccaagctcgagtt

SEQ ID NO: 5059 - DNA, 402 bp, Aspergillus oryzae
agaggaagccccggcggttcttgctaccctggtgattgacgatcaagagctgcagaagcatgcagtcgatggaggtgctattaaacgactatctcagctactgaaagaaacctataatccaattcaagagaacgcgaaaccgatgtggcatgtcgatggcggggaaaaggtcgagattacttgcacacaatcagcagagtgcatgctgggtcctccagggtattctcccattcattgtcatgtcatgcgataccgggagaacattcttaaggctttggccgctctggtgcctttcaaggatgaataccgcaagactatctgtgacaatggggtagtcccctatatcattgattcgctcaaaccgtgcccgaacgatcctcgagacacatctaatccgaaaaa

SEQ ID NO: 5060 - DNA, 296 bp, Aspergillus oryzae
ccgtcaccgagccatgaggttgcaagccggaccttgatcccataccgatattatttcggttcagtttcgctatcgcctccttcgcaggttgaacagtttgccctgacgagtcaggttccgtctcaatccccaagcctctgctgttatgtaccctgacatcggctgcaggagaattaggacgataatccagctctctcgaacgggatgagttcggctctggcggaagaggttggcgctgttggcgccggcgaccgaggatgttgatgcatgatcctcctgcgacatacaacgcaagt

SEQ ID NO: 5061 - DNA, 367 bp, Aspergillus oryzae
cccgtacagaggcgcgggtgcttcgtctacttaacgctcaaatgctagttcctgactaaagagtctacgctgaaagactacaggtttgtcagtcaattattccggcaaggcatttactatcagagcgagttaattgctagttcgttcgcctagcatgcatcggctcactagcttattgagtctttcattagcaatcgcatccggaaccaaagctttggatgcttccatattcaccttcggcccatctccaccatggcagaatatgaagactccggtggtaaccgatgatgtagctcggcatattttggagctccgaatgaacgtacctaccgtttcggctcttggaaagtgggaccaagacatagtc

SEQ ID NO: 5062 - DNA, 314 bp, Aspergillus oryzae
cggcacgaggctcaacttcgacggcatgctgaacggcatccgcgaggcccccgccggctccgtcatcctcctccacgcctgcgcccacaaccccaccggtgtcgacctcactcaagaccaatggaaacagctcgccgtcgtcatgcgcgagcgccgccacttccccttcttcgataccgcataccagggtttcgcctcgggcgacttgaaccgcgacgcctgggcggtgcgatacttcatcgagcagggcttcgagctgtgtgtcgcgcagtccttcgcgaagaacttcggtctgtacggtcaagcgcgcgggc

SEQ ID NO: 5063 - DNA, 377 bp, Aspergillus oryzae
caccattctcatctggctctgctggaccaccatcggcatgggatacactctgttcaacgccttcctgccccaatatctcggctcgacggcctccacatacgagacctaccgtaactacgccatcacgtccgtcaccggtcttttcggcccgattctcgctctctacatggtcgacatcaagtacatcggtcggaaaggtaccatggccatctccacgtgtgtcaccgccgtcctgcttttctgctttaccgcagccaagacggccgacacccaactcgtctgctccgccctggaatccttcactcagatgatcatgtatggtgtgttgtatgcgtataccccggaggtcttcccggctcccaaccgaggcactggaa

SEQ ID NO: 5064 - DNA, 404 bp, Aspergillus oryzae
cggcacgaggcggcacgaggcatcaaatcaccgcaaccaaaagaaaatcaatatgggtttctctgacttgctccagtccgccgtctcccaggccgttagtcaagccactaacagctctggcggcaacaacaacaacaacaaccagggtggttccaaccagggctacggaggagactcttacagcgagcgtccctcccacggcggcaaccaaggaggctacaacgaccgtccctctcagggctacggaggcgactcctacaacgaccgcccttcccacggcaaccagggaggctacaatgaccgtccctcttcaggctacggaggagactcctacggcggccgtccctcccacggcaaccagggaggctacaacgaccgtccctcttcaggctacggaggagact

SEQ ID NO: 5065 - DNA, 413 bp, Aspergillus oryzae
cggcacgaggatgatcatgagtgcttacagaatggcttttcctgggttgcgctccgtcgcaacaaggcgcgcggtcatccccgtgcgaaggagcttctctacctcgccatccgtgagagatgctgccggctccacgttgcccgctaaaaaacctgttggggcttttcgcggaggaatatttggcttccttactggtactattgttgccggtgcttccgtctactattatatccttggggagtacagagtgaccaacgagatgttgacagaggacatatacgcgcttcaatcagcaacacagaagcttcagacatacatcggtgaattggagacgaaagtggaccaacttaggaagaaatagtcctcacagagaaacgccacaaccagttccaagctatttttattaggagttt

SEQ ID NO: 5066 - DNA, 380 bp, Aspergillus oryzae
ctggagtgacaagagctggaacagaacctcatcgtgactagctgatacttctcattccacacttcttttctcaactatctaccaatttatccaagcaaaatgtctgcaccagttgttcagggcctctcctccttgggctctcaggccggacagtatgccaggcgtcaggccaacacatggagggacagactcttgactacagacaaatcgcgccgtagggcacagattgttcagacctcgttcgcagtccaccgccccgtctgggttacggctggcggtgctgcatacacgactgcagcggcagcacttctcacactgcgatcatgaaacgactaagatgaatggttgaaaggaggggtaacgagatccttgatggatgg

SEQ ID NO: 5067 - DNA, 381 bp, Aspergillus oryzae
cctcgtgccgaattcggcacgaggcggcacgaggaaaagcctcaccttctctccgtcccaaacacctccatcatcaccacagatttcacctttctaaaccaactcaaaatgtccgtcgacgccttcttcgaaaacctgagcttcgcccagtctggcgccaagttctccgacctccagtccgaagcctccaaaatcaacgtcgatcttctcaaggaggctgttaaggccgtcctcgccggcggtgacgacgccaaggtcgatggccctctggctgatgccctgaaggccggtttcgagttcgcgactaagctggtcaagaagctgacaaaggagcctggtcagactgagatgctcactttctacaagtacttcaaacaggcc

SEQ ID NO: 5068 - DNA, 411 bp, Aspergillus oryzae
cggcacgagggcctagcaactcgcccattgaagacgatcatgccgaaaagatagtagaggtgccgtccacagtagctacagcgaaagagggcgaagccaacagcgactggatgttctggggcgtgttcgacgggcattctggctggacgacttccgctaagttgcgcaatgttctcatttcctacgtggctcgggaattgaacaccacttacaaggctgcggctgctgatccttcgctacttacaccttcccctgcagctatcgacgcagctatcaagcagggctttacccgattggacaatgatattgtgcacaacagtgtcgaaaaggtgctaaagtctaactcgcggagagtcgcagccgagacacttgcccccgctttgtccggctcttgcgctcttcttgcctttt

SEQ ID NO: 5069 - DNA, 413 bp, Aspergillus oryzae
agcggcggcggcggcggctatggaaacccctcgggccctactggaccttcctcctggtggtaaatccagggttgtggtctctgacgaggccgtcaggtctgattggctccatttatcttcatttgcctctcgtttgacggatacgatcagaacaagccctgagttgttatttttcttttgttttatctcaggaacggctttgtcatgaccgccacgacttttttttagcttttattgctctttcacgttgtcttgtttcattttatcacgtcgagttatcggtgttttctatttctgagcatttcgcagattttgtttgcttgttctcgattttagacatggtcttatgatgcggtccgatctcaccatgttgctgctcctggttatacccttcatgtaatcgagagcatctt

SEQ ID NO: 5070 - DNA, 411 bp, Aspergillus oryzae
cagtgcttctgtggctggactccactctttcgtcgtatgagtgcacgcagttggttcccttcttcccagacgtgttcacgggacaactgctacacatgatggacgtaaaggaagatccagagctccaatcattggcctatcatgtcttccgacatttacccaatatcccataccccgctgagcagaactctgggttcatccagtccctcattcacatcggacagacgtcaccttcatggcatcagcgtctacgagttatgatcaacattcagatcatttacttccgccgtctattcctgctttctgtcgctgatagagacaagctttttgagtgcgtggcgaacatgctagaagaccctcagcacgaagtgagggctggagcatcagccaccttgtctggcatgatccgtt

SEQ ID NO: 5071 - DNA, 402 bp, Aspergillus oryzae
gattcactagcaatggtccaatactatgaatccatctcagatgatattcgcgactgggctttacgccagagcgtcttcttcgtggcttcggcgcctctgcgtggtcgccacgtgaacctgtccccgaaaggcctcccagacgcttctttcgcaattttgggccctaatgaagcagcttacgtggatgcgacgggttctggcaacgagacgattagccatatacgagaaaatggtcgtattactgtgatgttctgctcttttgacaagacaccgcgcattctgcgacttttctgcaccggctccgttattgaatggaacgagcccgagtttcctcaatacttggagcgcatgggaggcaaaaatgtcacaggcgctcgtgccattatccgtatggatgttttt

SEQ ID NO: 5072 - DNA, 401 bp, Aspergillus oryzae
tgccttcaaggataccgttagcagggaatgtctcagacatgaggagttccaaggaaaggtgaagctcggtcgcgtgcgcgaccatttcatcttcaacatcgaaagcactggccaattcgatagtgatgtccttttcttagaaagcgtgaaggccctgaagctcaaatgcgccagatggaagcggggattggcggatctcatgcggtaaacgagttctacgcaatcgtcccgcacttcatgttaaaatctttaatgcatggtcggcgttggtttccttgctattttgcgaatttgtacatttatgaaaagtcggtcaagaccttcttttgttgggagtctggaaagggcgatttttgtcatatagaaaaagcacaactgatattgaagccttgatctagcaa

SEQ ID NO: 5073 - DNA, 461 bp, Aspergillus oryzae
caagaccattaatcagtttatctaataacgtatactcggatgaattcgataacaaccaccgtgccccttagggcagcctcccttccgaagtcctacctgcacctcacactccgaggatgcacaggttctgttgccacagctggactacgatgcagcagtccattgctagccagcagaatcaaccatcagaacaccaagcgtttcatctcatcgacgccgcagacacaaacgaaggaattcttccctccaccaaatgcgcctcacatcaaggaggtagagacggcttgggcccaccctgtttataccgaagaacagatgcgccgggtcacagttgctcaccgggaaacgaaggactgggcagactgggtagctctcggcaccgttcgattgcttcgatggggcatggactttgtaaccgggtaccgacatcctcctccgggcaaagaacatgaggccaagtt

SEQ ID NO: 5074 - DNA, 370 bp, Aspergillus oryzae
aaagagcaacagcagcacagcaaagatcgaagatgtcttccaaacccgcttctcctcggggccccaaaggcctcacaaagctgtatctcctaggctacaacgctgccagcttaaccctctgggcaacctgcaccctccgcggcttctacctcctcacaaccaacaccccagagaacattcccgccatcttcaacgacatcttctggcctctcctggcaacaacccaaactctggccgtcctggagatcttccatagcttgctcggcatcgtgcgcgcccccgtcaccacgaccgcgatgcaggtcgcgagccgactgcttctcatctggggtgtgatgttcctgttccacgaacaaggtgacggcacagg

SEQ ID NO: 5075 - DNA, 461 bp, Aspergillus oryzae
cggcacgaggcagatatcgcctatcccttgaccggacccggtattatcgaaaccgacgataaacgaagatggcttcaactcttgctatgggactcggtgtcgcgaccgcggcatttttgggtcgcgcaggttatgtcgctttgcgtcgtgccaggggaggtgtgaacgccgcgggcaaggcattctacaagggtggatttgaaccccggatgaaccgtcgcgaagccgcattgatcctagaacttccggaacgtactttgaacaaggacaaggtccgcaagaagcaccgtcagctgatgcttcttaaccaccccgatcgcggtggcagcccgtacctggcaaccaagatcaacgaagcgaaggaattcctcgataagcatacttaatggtggaatcggaaggggccgtggcccctggtcaccgttgggggtattggcggatcctctaagaacagaagggtg

SEQ ID NO: 5076 - DNA, 477 bp, Aspergillus oryzae
cgtcaatgttgcaccccttctgctagaaactgacgaagaacgtcttctcttcaaaaagggagaagaaaactatcaggccaagaaagggctgagaaaacgaagtctgcttcagaaggccccagacgacgaagagagtaacctgattcactccatgtggaccaaggagatgtcatacctgagccccgaatctcccgatcagagaccatcaaacatggtcttcatgagcgacaccaacttgaaatcagccatgatcatgcagccgcaagaccgcaaccgtcacaacttcatgatcttcggtggtttccttttgaagcagaccttcgagcttgcattctgctgtgtagcgtctttctcccacgctcgacccaacttcatctcccttgatcctagcaccttcgagaaccccgttcccgtcggcagcgtcctgtaccttcgcgccacggttgcctatacagagcctgtcgaaaccgagtcagg

SEQ ID NO: 5077 - DNA, 426 bp, Aspergillus oryzae
actaggagccaaagtcgagctgagttgaccaaagtggatggttcctcgcccgtcgcatccgatgcctcgtccccggcagcagaagacggcataacccctcgtgataccaacaacaatgaaaacgagaacgaggatgattcccaggaacccccgtccaagcggcggcgcgcaaccagtttggaaccccggaagtcatcggacactgcgggaagtcgttggcaagaggacaatgcgatcgaggccctcaggcgagctatccagtctagtcctgctaggaatttcgagagtcgcaattctgccacggcgggtgagaatagtcttactcccaaatctgtacggagagttctgtttcctaattcgcaggctgagggcggccctttgaaagctctaggcgagtcggttctgaacagcccacgccgtagccct

SEQ ID NO: 5078 - DNA, 480 bp, Aspergillus oryzae
gcgtcaaatcaaaactgcgcgaagagaagctcaaggagctccgacacaaaatcgaagaggaggaggagcagcgcaaagcagaacatcggtacaagttgattcagtttgaggatgctcagcgtaaagctagggaggatgaagatgtcaaagcaagactgcgtgaagagaagctcaaggagctccgacacaaaatcgaagaggaggaggagcagcgcaaagctgaacatcgttacaagttgcgtcagtttgaggaagctcaacgcaaagctagggaggatgaagatgtcaagtcgaagctgcgcgaagagaagctcaaggatcttcaacgcaggatcgatgaggaggaggcgcaggaacgactcaaagagcagatccgtcaggaaaagctcaaggaacttcagcgcaagatcgacgaagaggaagagcgcgagcggatcaagaaagagatccgggatgaggaggcgagagccctacttgcaa

SEQ ID NO: 5079 - DNA, 419 bp, Aspergillus oryzae
ggaaaaaaggcttcaccgttagtgttctagcattggttgcaagcaacgtcggaggcattgttgccttgctcatcggtgtcattctgtcttacggtatcgggtcgtatgtgcaagtaggttacttcagctacctcctcgccattacaattgccggctgcattacgatcgtcttcgggaccattggccaatttctcctcccctcagttccgggtcaagagcggcccaaaggccagaatctcttactcctggccgtgaaagggtggatgcgcatgatcgggtcagcgcgtcactatcccgaagccttcaagttctgcattggctggatcctgtggaacaccggctacagcaatttcctcggcctgactcagtcgcttttcctcgaggtcaccggtatcgcgagagggtcgggcgtgtatcaa

SEQ ID NO: 5080 - DNA, 480 bp, Aspergillus oryzae
taagctaagaagataccccaggcttagcctcgctcggccatatctttagctataccacgaaagagtaaacacagctccctaccataaactaatcacctccgaaccacactccgaacaaacaaaaacacccgccatggctcaaatcaactatcgcacaatcaacatcgacgtgctggacccggagtcctccgtcaacttccccatggaaaccctcctcccccctaccctcccagccccgaccacatccagcgaagccgcaaacgtcgccgcccaggtgcgccagctactccgcagcggggaccccgagggagctctgcgcgctgtcctcgatacggctccgctgggcggagatgaccgcgcaaaggaggtgcacttggctaccgttatcgaggtgttgcagggaattcgacagggcgagatgacgaaggtgttggagggggtgtgcaatggacagggcggttccgagcgggcggactgctt

SEQ ID NO: 5081 - DNA, 426 bp, Aspergillus oryzae
tgagaaacatcccggcggtgccacccgccgattaataaagagaagcaaaaaacaaggaaaagaggttatctattcagaacatttttaaggccccgcaatttactacaatggctcgcactatacaagaaacccttgcctcggggtcccttagcgatacagcaagctcccagaagccagtacaatatgtggaaacggtcgaggcatacaacagatgggcggaggtttatgacacagacggcaactttctacaagctctcgacaccattgaaatgcaacaactactgccacagctcttgaacaaagtagccgccaacacacagccaggcccggcgaaactagtcgatttaggctgtggtacaggccggaatactcgccagctactgaagttcgcgcctcaagatgcccatatcgttgggctggatgctt

SEQ ID NO: 5082 - DNA, 483 bp, Aspergillus oryzae
cctcgtgccgaattcggcacgaggcgattgcctttgagtcaccattctttcactttaaatatcccagctcggcttccttcttcttttctcccctgttcttagaccatccttccttgtctttctctctctgtgacctaatatcctcaactcggacaaacctctctcacaatggcttctcagcagaacggaactaacggggcttctgcctccaacgacttcaccgtcaaggccggtctggcccagatgttgaagggtggtgtaatcatggacgttgtcaatgcggaacaggctcgcattgccgaggaggccggtgctgccgccgtcatggctctcgagcgtgtccccgccgatatcagagcccagggtggcgttgcgcgcatgtctgaccccagcatgatcaaggagatcatggaagccgtcaccatccctgttatggccaaggcccgcattggtcatttcgttgaatgccagatccttgaagcc

SEQ ID NO: 5083 - DNA, 491 bp, Aspergillus oryzae
gtccgaacctggcttcaacgcgactagaaactaatgctatagatttaactagcgacatttatcctggattgaaatcaaccgacaccggtgatctagggctcttttagcataacttcaacaaatccgaagtcctagataggaagtgaaaagaaaatggcaacttgtcttactgcccccaaacggccgtttctagccctgccgtcatttgttccgtcttcgtgtccgtcgatcactttgcaaacacgccggcatcaatcctcgtataggcggacgaaacaacgcctacgtgtcaaaccagatgcgtcgtttggtgtttcgtccacccaatttcatgatcaaatcattcacaacccgccttcgagcgccccctcggtataccatacacccacgaaattcctccctctcgatgatgttcggagaacccttcgtggcgcttccatgaacaatggaaattctgctcaactaccctctgttttcaaaacatccgtgga

SEQ ID NO: 5084 - DNA, 439 bp, Aspergillus oryzae
aattcaatgcttcgcttttgtttcgcagagtcgtggcttctgtgcgaccggcccgcccactgaatccctgaaggcagagtacaggagattgagcgcactaggttctcagagttataaccctgttgattctgaaagtcgggcggcaataaccccgattgtgatagatacgtggttccacatcattactggtgaagcgggaactgaattgatctcagatgagatgattgctgatcagctttcttaccttcaaaacgcgtactggaatgccacaatatcctaccgcttacaaggcgtgactcgctcggcaaatgatacgtgggctcgcaatgaggacgaaatggcaatgaagactgtccttcgcagagggagttaccgtacgctcaacgtttattttcacacagatctccaggcgtcgcccaatgcgggtgccagggctttt

SEQ ID NO: 5085 - DNA, 470 bp, Aspergillus oryzae
cgcgacttaaaaaggacataaatagcagttcaatatccagctcgcaaaatcttcatcatgaccacacgcaaccttaacaagacttggagagacattatctttgaccagtactccgcggatctttccgccaacgaaccgttccctattcgctacctgatcaacgcccctgaatggaaaaaagacataattattaacgttccaaagaaaatctcactcgaggcctaccgccgttcggttcttgcattctgtcgtacaaaataccgcgacagtgatccagtttacgaggacgagaatctctctgtccgaccacgtgtatcaagacaccaagcacaagctgaagagattgacaaatatcaacatgatctggaaaccaaagataaccctaccggctttggtgttttttacgacaggagttagcgggtggaggtttgtcgtctacggggacggggaatgtgaaacgactgcaacgg

SEQ ID NO: 5086 - DNA, 454 bp, Aspergillus oryzae
gcagctacgcccaatgctagtcactcgtcccctccacaaagttcacatggcggtgttgcactttcagggatcagccccaccaagcaatcacctcgccccgttacttctgggagtatgacgggtgcgccaatcttgcctcctatacagaaacttgagccgagtcccaagttgatgggacgcagttcgcctgatgctcccattccgccacccgtaaagtgcatgactcctgagcaagaggagcgcagacagcgcgaaaacgctctgatgcttcatgcccagtcccatgctcccaatggtcaacattcggccatgtcatctccatcgcttaaccggataccgcctctgggaccatctgcactgtcgcaaagacatgaatcaacggttcaatccgaatctggtcccaagacggaggggcaatagagcaactggtttggccgctatgcgtagatgcttt

SEQ ID NO: 5087 - DNA, 259 bp, Aspergillus oryzae
cagcacatctaccaccactacgacgagccttctgaggagcgcgcttactctcctccgccggatgactggtagtggtagtggggcacactcggatgatgcgctggcattttttccttttcttctgtcgactttctagaataggtcctttgcactagcccggtttggttttagcatgaaagtgtcttcgggtattttttatttgtttgctcgttttcggtctgcaggaaactgttctaaaaatatacttcctttaatttgg

SEQ ID NO: 5088 - DNA, 301 bp, Aspergillus oryzae
cggtggtaacgtccagaacaagggacaaggcactggtaagccaactgtggttctgcaggaaggcgaactggagggatataaacttcgttctttcccatgggaggagattcaagaaaggatcgccaggtggaagttgggaagaaggtgaatggagtgaagtccagagaaggaataatccagggtatagatagaagccgctgcttattgtatagtatagttaagagaagggcgtgacgcccgacagttttcttccctctatgtaattaaaacgaatgacatcaaaacatgttgttctcgagcg

SEQ ID NO: 5089 - DNA, 485 bp, Aspergillus oryzae
gtttgtgatcggctcatgcagcctggaaggccaatggccatgatgcttttcaaaacatttggttatatatccatgtcccagggcttatacttctgccaggacatgaaactcggtcactatatgaaaattcctccccgggttacatttgccgcccaaatggtcgctaccctgtggacgtcgatcgtccaaattgcagtcatgaactgggcattaggatcgatcgatggtatctgtgacaaggatcaaccgaaccactacagctgtccgaatggccgcgttttcttcaacgcctccgtcatctggggagtcattgggcccgctcgcatgttctcacccggtcagctctactccggcttaatgtggttctggctcgctggcgctatcttgcctgtactcatctatctgggcgcccgtatatggccccggagcaagatccgctacctaagcgcgcccctgatcttcaccggtgccggattgattccccc

SEQ ID NO: 5090 - DNA, 498 bp, Aspergillus oryzae
cttcgataccctcaagacgaagccgctgcccgtgcccaccacgaccccgacatcggttgcccccgtgcccaccgtcgtccctggccatgatctcattttccaggagttgtccaagaccagccaacggacactatgggtggtcgtcgtgctaatggctatatccgccatcgtcttctacatcctcgcctcccgagcacctttgaccaagcgagtcatccacaacctgattgccatctccacaacaatctccttcatcacctatctcgcactcgcaaccggcgaaggtataacatacaagcacgacatcctgacgatccacaacaagcacgtccccaacactcatcgtgatatctaccgtcaggtcctctggctgcggtacctcaactggttcctgacaaaccccctggccctcatcaatcttgccctcttgtccggcctcccgggtgcccatctccttgtcgcatcgtcgccgattggatcatgctcggcaccggcatc

SEQ ID NO: 5091 - DNA, 536 bp, Aspergillus oryzae
acacaaataccagattctcaattgaacaaccttacaccaccaaaatggaagacaagcccctcgcccccgcgagcaaagatccccgcgaactcacagcccaagagtcctccgccgccgtcatcttcccctccttcacctccaacacagcctggtcgctcggtctcgcgctccgatcccgaatcctctctctccccgcggaccagcgcaagccggctctcatctccattgcgccaaccggcgggtccgagccacatgttgtattccaagccgccacggaaccggggaccttcgccgataatgaggtgtgggtgcggcggaagcgcaacaccgtgctgcggtggggagtgtcgagctggcatgatgcggaataagatgctaacgagcactggcttgggggcggatcaggtagaggcggcgtttgtgaggaagcacgccttgacgagtaccggtggtggaggggcggcagatgacttcgcgatccatggtggggcgttccccgtgcgggtgaagggagtggatggtgttattgggcgtgg

SEQ ID NO: 5092 - DNA, 491 bp, Aspergillus oryzae
cggtaatacgtagaagactagtgttagtcatctttattaggtttaaagggtacctagacggtaaattaaactctaaatgagtacttttttactagagttttatgtgagaaggaagaatttctggagtagggatgaaatactttgataccagaaggactggtaacggcgaaggcatccttctatgtaaaaactgacgttgagggacgaaggcttgggtagcaataaggattagataccctagtagtccaagcagaaaatgatgaatgtcataggctagatttaaaatttagtctataaatgaaagtgtaagcattccacctcaagagtaatatggcaacatataaactgaaatcattagaccgtttctgaaaccagtagtgaagtatgttatttaattcgataacccgcgaaaaaccttaccacagtttgaataacaataaaattgttacaagcgctgcacggctgtctttagttaatgtcgtgagatttgg

SEQ ID NO: 5093 - DNA, 499 bp, Aspergillus oryzae
cggcacgaggcaagtctcactgccccgcagttaggctctcatgctattaaagctgcgctcagcaaagcggatggaatcaagccgtctgatatccaggaggtcttctttggcaatgtcatctccgcaaacgttggacaaaatcctgctagacagtgtgctctcggcgctggtctcaatgaatcaactgtctgtactacggttaataaggtgtgcgcgtctggcttgaaagcggttattctcggtgcacagaccatcatgactggcaatgcggatattgtcgtagcaggcggtgctgaatccatgtctaacgcccctcattaccttccaaaccttcgcgtcggtgcgaaatacggcaaccagagtctggtggacggtattatgaaggatggcttgacagacgcaggaaagcaggaactcatgggcttgcaagccgaggagtgtgctcaggatcatggctttagcagggaacaacaggatgattatgccattcgcacttacg

SEQ ID NO: 5094 - DNA, 467 bp, Aspergillus oryzae
cctcgtgccgaattcggcacgaggcacaccagcgccccctcgggtggctctagctccggctctggttccagctctggttccaactctggctctagctccggctccagctcttcctctagctcttcctccagctctggtgctctgaccggatcttgcagctcggagggaacctggaactgcattggtggatcttccttccagcgctgtgccaacggacagtggaccgcagtgcagcagatggccactggtactgaatgtactgctggtcaggcctccaacctcaagatcaaggccaccaacctcaagccccgcatgctccacgagatgcgtcacaggaagcgcaactaccacaaccacgcttaaagaacgtctgatatccgctggcccggctattaggattccctgatttctcttcgttttccttgcagcggcgtggacgcttgtggggatcctttctgggatggatt

SEQ ID NO: 5095 - DNA, 512 bp, Aspergillus oryzae
tccattttcagtggtcgaagataaaatggctcaacaaatctcgcactatgttatgcgcacccgggaagaggtcctcgtccataatgttctcgaggatgaccggttctcgaatgtctcggatgcttaccagggtagatatccgcttggcaagtctgtgattgcactgccaataatgcaagcggagcatcttcttggagttatccatatcgaaggaaagccaaactccttcactcagcgaaaccttgtagtccttcacctgctctgtaaccagattggtatttcgctgtccaatgccttgcttttccgtgaagtccgcaaagttagcgccaccaacgcatctatggttgaagctcaaaagcgcgcactcgcgcaggctcgtgaggcggagcaaaaggcgaaggtagcggaagctgaagccaagcataacgtcaagttgaaagaggatgcagcgaaggccaaatctattttcttggccaacatctcccatgatctacgtacgccaatgaatgggg

SEQ ID NO: 5096 - DNA, 502 bp, Aspergillus oryzae
cggcacgaggttctctcccaatctacctcattacaaaccaaaaaccaccatgtctttccatcaatcttgcgacctcatccggatcgaagtccgtggcgatcatactgtcctccttgccgcagctaagaatggtgatggggatgaaacagttcccgcggagattgtccttgacgaacagattggcaacggtgatggttggttcgttcgcgggggtgagaatttcacagaaaccgctcatgaaatcgaattggagttccgggaggacggtccttggttgactgcattcctcaccgaagtcgatggagaagatagagagcgtcagggaattaatctggctgaccatattgggaatgactgtggccgacttgtatgggcttaactggactggagcaataatcttgtaaggttcacggcggcagcggcagcggtagcggcagcggcggcttccgctctttctgacgacttcccgtctgtgtcttggcgcttgcctcaggcagttttt

SEQ ID NO: 5097 - DNA, 517 bp, Aspergillus oryzae
ggagattcaaaccatcaagcaggacatccggtttatcaagcagggtgatgtggcatccacccggaatgccctgcgtattgcggcacaggccgaggagacaggtcgggagactcttgctcgtttgggtgctgcaaggcgagcggatccacgacaccgagaagagcctggatatcgccacaatagaaggtcgtattgccgaggagaaggcgaaggagttgaagacgcttaataagagcatgttcgccgttcatgtctcaaacccatttaccagcgcccgtcgtcgccgagaccgcgacgagaagatcttgaatactcaccgggaagagcgtgaaactcgtgaaggcactcgcaaggaggcttttgtcaccaaccaacgtatggagcgcactttcagagagatcgaccgtgaagctggcaagcataacggaagagcgcgtacgaacgctaccgagcgtgctaaatatcaattcgaggccgatagtgaggatgaggcgatggaggacgagatcgagcagaa

SEQ ID NO: 5098 - DNA, 467 bp, Aspergillus oryzae
ttttttgttaaatatccttatactttaatttgtccctcatggaggccgtacagtcctttctctcctcactctggcagtccgtcggcttctggaaagctgctgccatcttctttgccttgctgaacctgaagaccctaccgatcgtgtggcatatccgggtgtaccgctacttcttcaaacatggctacctcattaccccggccgtcgaacaaccccctcgtccctcgaccgagatcctgaaacccgtcagcatcttctcccgcgcgcccatcatggaactcgacttcaacatgcacaagtccaactcgacctacttctccgacctcgatgtctcccgtaccgctctgatgtcgagtattgtggtgaaaggggccgcgctcttggagaagaatctgaaggcggaaggaaagaagggctttttgggatttatcctcggcagcgtctataccaacttcaagagagagatt

SEQ ID NO: 5099 - DNA, 501 bp, Aspergillus oryzae
atcggacattgtttatcccactttgccagccttgacaccggaccatgcttcaaagaagtccgatagcaagaccaagtcgcccaccatccgccacgtccgtcaatcagatgcccctaccaatctctccctaccggatattcccggcgttccacatggaatcggcagcaaaaagcgacaccgcgagacggaggccactcacgacccttctcttcccgatgttccaggtgtgcctcatggcatcggcaacaagaagagacaccgagatgcagctgggagagatgttgacacggagaatgtgccgccagccgatactgccgcagaaaaccgcagtgcgaagagagttaaactgagctccccatctaagctctcaccattcaagttctccccatcgaagatgccaacccctagccccaccaaggcgcgttcacacactcctctccgatcgaccacaagtgctagtcgaacgggaaccccagccagtgcacgacagaagagccgtaa

SEQ ID NO: 5100 - DNA, 513 bp, Aspergillus oryzae
aatcgcagcaaaaatcatatagctcacgatgtcccagttacaaaattcctacggtacatgcactacccatcgtcatcaactgaaactgaaattccccgaacataaatcaagccttaaattgctctccgcattgacatttccgaatgtcctagcacgctgctggttacccagagaatcaactgatgacgaagaaagacagactttattgactccctcttctactgctccttcgacattaacagagcgatacggtctatccaccatcattctgcactacggcgtccacagctccgtaagagtatgtacacggaaatctccatctgcgggagcttctaggcaacttcatgtcgtcaaaattctccgtcgatcatcggatgccctcgtcagagctactcagcgtttcgaacaatctctctcctcggccgtatcacaccccaacctccttcagaccatcgatgtccttcagaacgaacatggtgagacctgtctagtcatggactattgtgccggtgg

SEQ ID NO: 5101 - DNA, 370 bp, Aspergillus oryzae
caagaagattattcactaggttacatacacttcactccaagatgccggtcattccttcggacacgaccaatttcccatcagcagccagcaatagctccaaccagaatgaaccacagaaggccactgctcaggaccatctgtctaaaggaccacagattccggacaatatgccacccaaagcttcccgagaggaaatcgaagcacgcaagaaagagctaaacaaataagccagaattttaacggatgaccatgatggaattttcattatcatgaattatgatgcgcagcggattgttatgtaggacggtcactggtctagtttcttctgtacaaggagacaggtagcaattctatattacttgtcagactc

SEQ ID NO: 5102 - DNA, 506 bp, Aspergillus oryzae
gctggccaacgtcaagccggcccggtacctggagcctttcgctcccaccggtatcaccggccttgtcactcatcccagtccccgcccgactttgatctatctctacacaactaccctgcagaagttgaaggccttccccgagtcttccgtctaccgccagtctaccgaggctttaacccgccaccgcctgcaaattgtcgaatctacgaaacctcctggctatgaggcttggttggagcgcgtgaagaaggctattggtactgaacctgagcggttcgcctctctccttcgcccagatggcacgtacgcggcagtcatgcgcagcgatggaagcgacaatcctcgtggtgaggagtgggatggagaagccctcgagccgaccagtgaaggccctgcccgtaccccagaggaagaagctcggtggcaccaggctatcgaagattcggttaaggcagagaacgagtctgatttccaaactcatgctatgaagtgggagaacgaagccc

SEQ ID NO: 5103 - DNA, 521 bp, Aspergillus oryzae
tcgccgcattctccgtttctttcattgtggggtaatttagtttaaggcatttttctagacatcgttcctacttcagtctttcttcgctcattctggttaccatttccattgaacatcctggtcaatctataagcacaatgactaaaggccaaggctcattctcagcccctccgcaagtcgtcacttttgatggcctcctttcagatttcgacggaactatcgtcgattcgactgatgcgattgtgaagcactggcacaagatcggcgaggagctaggagttgaccctaaggctattttggccacgtcccatggacgtcggagcattgatacgctgcaggagtatgatccgaagctggcgaattgggagtacgtcagctttatcgaaggccgcatccctaaagagtttggctccgatgctgttgaaatccccggcgctagatacctcctttcgcagctcgacgacgccggtgcctgctggggtgtcgtcacctccggcacgcgcgcactcgttgatggctgg

SEQ ID NO: 5104 - DNA, 524 bp, Aspergillus oryzae
cggcacgagggaactctggtggccgtgctgggccctataatttgactgctttcttccgtggcaaaactcctccagtacaactgcagcatccaatcgcgatgccgctcagccgccgagggcattgcgtcattgatcgcatctggtgttgggcttcaatctcatcgccagaagtccacaaacttcccctctgcccttcaatcatccaacttccactcaagaactatcccccgtcctcccgccagattcaccatcttcataaaccgctcttagtgagccctcaccgcacacgcgacaacaccactgtttcacaacctacccctctccaacccaccatctcgcgcacaatgtccgacgacgcctacatgagcttcctgaacaaagccaacgcggacctggacaccgcgcgagctcaacaagcccaggactcccccaccgtccgtaccgaaacagtcgaaacaggcgtcagcgtcccagctccactgacatcaagtcgacgcctactacatctctgaaaccgatgaacc

SEQ ID NO: 5105 - DNA, 532 bp, Aspergillus oryzae
gagattttcgcatataccgagcaacggttaagatcgaaccctaattccatggccggccatgggtcaacccgatcttgaatctcaaacccccaaaactatagacggggccacgaaagagaaggaagagaaaggcagcaaagttgaaaagggttacggtcttcctttgtggcggaaatgtatcatcctcttcgtcgtcagttggatgactcttgccgttaccttctcgagcacatctcttcttcctgcaacccccgagatcgccgaggagttcaacaccaccactgagaccctcaacatcaccaatgccggcgttttgctggctatgggcttctcgtcgcttatctggggtcccttgaataatctgattggaagaaggctctcgtataacattgcgatcttcatgctctgtgtgtgttcggcagcgacgggggctgcagtagacttgaagatgtttacggcttttcgagtgttgagcggtttgacggggacgtcattcatggtatcgggacagaccattctggcggacattttt

SEQ ID NO: 5106 - DNA, 546 bp, Aspergillus oryzae
ccagaacactaccaccacacctccaaatataaaaacagcagcgcagaaatcctaccaaaatggccgacaagctccgcacactccagaacctcgaggccatgcaggctcggtacgtaggtacgggtcacgcagacacgaccaagtacgaatggacatcgaacatcatccgtgacagctacgcttcgtatatcggacatccgccgatgttgtcgtatatggctgttggaatgggggagccgaaggagaaggttcgggctatgtttattgagaagatggttaggggggctgggaatccgcctgagacgcaggagtgaatggcttgggttttatgggtgactgtctgttgtgatcttgttataattgttggttgtggtgtcgaggtatattattgaccacactgcattcgctgagacggggactctgcttcatggcttgtgggttgatctcgatatcagcgctggtgttggcattgagtcatgggtactgcttgatgccggtgaaatgcggtccgttcactgttgcccttgatcgctgggagttatggag

SEQ ID NO: 5107 - DNA, 612 bp, Aspergillus oryzae
gagtttactcaagcgtgcggagcatttcccggagatctttcatctatatgcgcacaagccggtcccggaggagaatagctcccctgtaaaattccacaaggcgaatcccaaagacatcaacagtgctattcccaccgaactcgccaacatggctctagatgtcgctatcgagcagcggaacctgtctctcgttcttgcgatcattgataatacattttgcgctcccgcgtttgcccgcgcgaaggtctttaagaaagcagccgtgcctctaggtgggctggctgctgcaccggctgcttgctatgccattgcatcctgggctgcgacactccagaataccatggatcccagcacagctacaggcattgcgttcgctgcaagtcttgcatacgtgggaggtgtatcgtcggtgggtatcttggctatcaccacggccaatgatcagatggagcgggtaacatggttgcctggtgtcccattgcggcatcgctggctccgggaagaggaacgagctgctttggacagagttgcacttcaatggggttttaaggacatctatatgcgtggcgaggaagagggagaggagtgggaaaacttacgggagtttattgg

SEQ ID NO: 5108 - DNA, 612 bp, Aspergillus oryzae
cggcacgaggtgtggacgtttctactgagcttgaggagaagcgaatccgcctctgcaacacgcacctagagtccatggcgcttgaccctccataccgcccaccacagatgcagctagtcgctcagtatatgcatcacgatggggtacacgcagctctcgtcgccggtgacttcaacgcaatccagccgtttgaccgcacgttgcatgtggacaataatctcaaggacgcattcctggaactaggcggagcggaggacaccgaggaaggatatacatggggccaacaagcaacaacgaagcagcgcgcgcagtttgggtgttccagaatggacaaggtctattttcgagggtctgtcaagttactgaagtttgagaaattcggagaagggatcctggctgagggggacgaagaaaggaggcagatcgtggagctgggattcgagaagccctgggttacggatcacctgggggttatggcggtggtggaggttctgcctagcacgaaggggcagctttgagtggacactgtgggataggtttactattccgtctgttatggtacgtttctctgctcttggcagagtgggtagaaatctactgtgcttttttctg

SEQ ID NO: 5109 - DNA, 362 bp, Aspergillus oryzae
cggcacgagggagacacagaaaataaaaagggaaaaggaggaaaataaaaaaccagaaaacaagttgagaaaacaacaaaagtactcgcgaaaaaccccactaccttttgggtggacagaccgcacattttcctccccttccatttctttctgggcgtctacagaacgacactcgctttaccgcctcgaatttcctttgtgctactagcagtcgatcgctggaaaccttttttttttttttatcgcccctccgaaaccatggctgatctacgaggacgtaagatcttcaaggtcttcaaccaggattttattgtggatgaacgatacaatgtcacgaaggagttgggtcaaggtgcatatgg

SEQ ID NO: 5110 - DNA, 487 bp, Aspergillus oryzae
ggagacggtcaggttgccttcgtttacgtgtgtctcggtctggcgattggtgtttatggaagcttcatccacgacattatcaccacgatatgtgactacatcgacatctggtgcctcactatcaagcacccctatgttgagaagcaaaccgcgaatggtgaagtggatgcagttgagaagaagatgagctgagagatagaatgtcaagatttcattgcatatcaactatgcgaagaacttccatggtgagtatgtcataaaccggtaagagtttcttttttctgaattaagcttgctggattcatttttcgggtcaaaacattaaagcattgggttggccttttgcaaattggagtcaggctgtataaaaaagacgaaggaatatcgggccattcatcctgcgatgcatatgggctggaaacctttgtgtcacatgtgatgtctaaatgtttgattaggttgatagaaaatactaccttaatgttgt

SEQ ID NO: 5111 - DNA, 669 bp, Aspergillus oryzae
ggaagcgccttgaggatgagcggcacaagctcgtcgagaaggccatgaagaccattcctaactaccacccaccttctgactacagacgtcctaccaagactcaggagaaggtctacgttccagtgaatgactatccagaaattaacttcattggcttactcataggacctcgtggtaataccttgaagaagatggaaaccgaatccggtgccaagattgctattcgtggcaagggctccgtcaaggaaggaaagggacgatctgacgccgctcatgctagcaaccaggaagaagacctccattgtttgatcatggcagacactgaagaaaaggttaacaaggcaaagaaactagtgcataacgttattgagacggctgcttcaattcccgaaggtcagaacgagctcaagcggaaccagcttcgagaacttgccgctcttaacggtactctgcgtgacgatgagaaccaggcttgccaaaactgtggtcaaatcggacatcgcaagtatgactgtccagaacagcgcaactttaccgccaacatcatctgtcgtgtttgtggcaacgctggtcacatggctcgtgattgtcctgaccgccagagaggcaccgattggcgtaacaatggtggttaccgtggtggtggtggcccgtagagctattggtcaa

SEQ ID NO: 5112 - DNA, 379 bp, Aspergillus oryzae
cgcttctatccgcaccgagacgcccatcgacttcgacaccctcaccaaccacgtcgccaaaccagtccaaccgtcgagatggcccaggaacgctccggaattgtggtcggtctgaacaagggccataaaaccacccccctcaacacccccaagacccgtgtcagccgcaccaagggccagtcctcccgccgtactgcctttgttcgtgacatcgctcgtgaggttgtcggtcttgccccctatgagcgccgtatcatcgaactcctgagaaacactcaggacaagcgtgctcgtaagctcgccaagaagaggctcggtaccttcggccgtggaaagagaaaggttgaggacatgccagccgcggtcatcgctgagtccc

SEQ ID NO: 5113 - DNA, 399 bp, Aspergillus oryzae
catgaaccaggcaggacgtttcacgttggcttggtcgttgcctttgaactcgcatatcacgattcctatgctagcatttctacggcgttctagcgattcggtctgtttctggtcgtctgtttcaacaaactaaagtcttttacaattagaagtcgcacaccgcagattcaagggggcggtactgtgcgctggtcgatggttgctccctcttaattacttgttttgcgttctttgcctatcggctgctaaccctttcatcttgaccctgtctgcatggaagtggttctttgagccctatttgttttcacgactcttgcagaagatgacggatcagataggaagaaaaattactggcaaataatttcctctaagacctttggaacgaaagtgggaccgaaa

SEQ ID NO: 5114 - DNA, 394 bp, Aspergillus oryzae
cttccaattactctcgctgcatttgcggaagctatcaaagagcttccactttcctctgtgtacgccaaagcctccgaactttccaactctatcgcacatctgcggcgctcaaatcaagaactaagggcgttcatgcatgagtcatgcgacaccgaggctgagcaaagggagctggaaatgtatatcactgaaaatgaagaagtgataagatcgatgcacgaaaggaatctgctactaaagtcggaaatagagggccggggtcagcaatggatcgagatgtgggacaccgcgccagatgcgagagcagatgagaatcaacagccatccgcatctgaacccgctacaaatggggcaagcttgccagtaacaaccaaaatgggtgccgcagccaggg

SEQ ID NO: 5115 - DNA, 395 bp, Aspergillus oryzae
gaagaccccaatctccgccagccctacactttggtgctgagtttggaagatttgcttgtgcacagtgaatggagccgtgaacacggatggcgggttgccaagcgacctggagtcgactatttccttcgctacctcaatcagtactacgaacttgttcttttcaccagcgttccgagcatgatggcagaccaggtacttcgcaagctcgatcctttccgtatcatccgctggccattgttcagggaagccactagatacaaggatggagagtatatcaaggacctttcctatctcaaccgtgatctgtccaaggttatcctgatcgacaccaaggaggaacacgcccgcctgcagcccccgaaaaacgctatcatcctcaacaagtggcaccggcg

SEQ ID NO: 5116 - DNA, 210 bp, Aspergillus oryzae
gcaataaccatgtctttcaatatcggcagaaacaccctcatccgcacccgccctctcctccgcacctccaccctaacaagaacataccaaatccaagcccaccctgaagcatacagctccaaaaaccaagaatttttcatcgccgcctgcttcccagatgactttgaatcgcccacgttgacggaaaagcgcggcgttccgacggaatcg

SEQ ID NO: 5117 - DNA, 397 bp, Aspergillus oryzae
cggatatcccaactgccactatgtcttagctcacgcctcagtcccaaacaccaccgctatacgtcgcagaacgctagagagctcaaccaggggcctagcccacagagtcgtacgaggaacatccactatgccttcgacccagtcgacaatgcgacggcgaaacaactatccagtccattctccttcctaagtcctgagaatattccgctccccgtattccagcatgcgaatcgcctcgtcccatccagcctcggcgtcccatggcccacctccttccccaccaccttccagtcgaaatactgggtagaagtggaggagaggacaagggcatatactcaagaactcctagccctacggcccggggaaaatatcaagcgaaaatatatcggaggcggtt

SEQ ID NO: 5118 - DNA, 398 bp, Aspergillus oryzae
tggtgttctcgattcccctggaaatttcgggaatgcccagaatctgcgtgcggcgaagtcgttcgcagacctgcgttcctatactccgtcgcctgtgccttcgtccgcgagcttcccggcagccctgcagtcgaatggtgcacgcctccagcattatgatggtgccaccagtggcgcctccaataccccgacgctcacgcctgccccatctggatcgtctctgggcatgccgcgggatgataatttgttagtgaacagtctcagcagcctttctctgggaactggaattggtgggcctagctcaagcccacggagattgcggggtatgttttcttgggaacagccggaaagtcaacccttcccaagtgctggacccatcgggtagtaaccgatccatc

SEQ ID NO: 5119 - DNA, 330 bp, Aspergillus oryzae
taaagagctacagaatctccacccttgctgatgacttctatgtcctcaatgccctaaagtgaagccgtgtttacttccgcctcgacggttggtatctgcgaacgactcgcttcggtgagcttgttcgagtgcctctcgtccagggagtggtgatgatctttaccttgtctcgatgtcttgatttcggtcggtcggacttggtgggtgttgaggaggtctgaaaggtgttcccgttttcttctttcactttgatgctggtgatgagatgattgggacatggagtttggctattttgatacccattttactcaatcgaaaatatttgctctg

SEQ ID NO: 5120 - DNA, 394 bp, Aspergillus oryzae
gtccgatggacgtaggtataccgttaatatccagacggattcgatcgtcgagaccgatatccaccagcacagactgtatactcggcatcatagggttcaggaggcgtcagatgaggacctctcatcgcatgaggcggcggcggaggagtcgccggaggtgtatccaagccgtgtaccgccttctctttcggatgttccgcctgaatcgactatcatgtcgacgtcgacgagtacggagacagctggaaccacaggttgggagacgattctgttaccgcttaacgcgtttgtgcgcacgaaccatggtttggtggttgagccgcagacttcgatcctgcggcagcgggtgaagagttattggtattggactttacggatccgcgtggagggtccc

SEQ ID NO: 5121 - DNA, 373 bp, Aspergillus oryzae
gaagcaaggatacgtcaatctccgctgcgcctgggttctcggatgtccgggggagatccacccgcttactgatactcatcgtaacgacgtccatgtaggcgagtacttcaagactggtttcatggagctcttccctggcgtcgaagtgccggaggaagttggggtttcgtgctgtgcgcaattcggtgtcacgcgatcgaaggtccttgagcggccaaagagcgactatgtacggttcaggaagtggttggctgagacaccgctggaagatgaccttagtgggcgcatcatggaatattcatggcacatgatctttggaaagggccccgtttactgtcccactgccgaagagttgcttactggtaaggtggtt

SEQ ID NO: 5122 - DNA, 519 bp, Aspergillus oryzae
cggcacgaggggtacatgacgacacgcctatggtgagaagacaggctgccaacaacttggcgaagtttgtcaaggaaatgaagaccccagttgtcatcgaagaaatgatacccctatttcaatatctggccagtgatgaccaggacagcgttcgcttgcttacagttgatattcttatctcgatcgccgaggagatccccaaggagcagcagcctagccacggtgttttgctgacatccctacggaacctctttgaggataagagttggagagtcagatacatggttgccgacagatatgaaaagatcgctaaagctgttcacgaagaagttatcactcgggatatggtaccctcgtttgttaagctcttgaaggatacagaggctgaagtccgtactgcgattgctggccagattcaggcttctgcagcttgatcgaccgggagacactgcttaatgaaataatgaccagcgtggaagaccttgtttcggacccatctcagcacgtgcgtgcggcttt

SEQ ID NO: 5123 - DNA, 503 bp, Aspergillus oryzae
caaaatgtttcccacccgtgccctcctggggcgttccgtttggaaaggcccaaacattgtccctctccctctcccccggaaactccctcctccgccgaacacacccccgatcaagacgcaaaagcgcggagcaacaatcctccctaacttcgtgggcttgcggttctcggtgcacaatgggaagaactaccaggatgttttgatcactgaggagatggtcggacggaagcttggtgaatatgttgcgacccggaagaggtttacgtataagcagtcgaagaacaaatagttaattggcttggggctgtgtggttattgtgctctgtgggtgatgggaagggcaataaatgcctgacttgaggtttgcggggaggattctactgttctctattggcgtttccgtattcttgtatatctatgtcgcatatgttgaatgtaaaattagctgtcattgtcactgtggagtcaggataatcagtatcattgagtcaatattgtgatct

SEQ ID NO: 5124 - DNA, 396 bp, Aspergillus oryzae
cgacgacgtatccccccataaccagattatcttccaaaaagtacctcgcaacctccccagaaatgctacaccctactgacccctccagaccgtctacgtaaccatggtcatgtacggaccaacagcctatctgaccaaagtctcgctcctatggatcatgacccgagtgttcagcccattccgcaaagccgtgaccttcatctacatcttcctcggcgtcatgctggcctactacatccccgccgttatcgtcaagatccgcatctgcgaccccatctccaaattctgggacccagatcgcccgggcacatgtctcaatcagcgttccatcatcatggccgacgctgtcgtcagcgtagtcagcgacctttatcatccctccttgtcccgttgccg

SEQ ID NO: 5125 - DNA, 512 bp, Aspergillus oryzae
cggcacgaggcggcacgagggtcgtccgcatccagggcagcgagaaggatacctggactattgccttctggaacaagatcggccctgatctcaagctcactggctggtacggcaatgctgttctgaccatcaagatcaaccccggtgagaccaagtacgttgctttcgacgaggacacccaggctgcttggggtgctgccaagggtgactcgcttcctctggaccagtacggtggctacggctgcacctggggtgaaatcgacgtcggcaacctcagcaatgatgcctggtccggctgggatgtgtctgccatccaggcccagaatgccggtctcgatgtccagggcatgaaaatctgcacccacgacaaccaaaagtgctcttccatctccaacttagccaaggcggttgacaacgcctacactgccctagacgccggtaaagacggcatcggtggtgaatggcccgctggccctctccgtctggttgtcgacattgactacgactaagcg

SEQ ID NO: 5126 - DNA, 161 bp, Aspergillus oryzae
atgaaaaaccaggcgtcctaacgccgagccgcaacaagactcaaacagcgacaacggaccgcccatccagccccaataaaccaaaaatcaaaccgctaccgccgaagtcaagacgctggcgtggacgacgcactactggagacgaaaacgacaagatccgg

SEQ ID NO: 5127 - DNA, 604 bp, Aspergillus oryzae
cagcctggaaagaacaaatcactaagcctctagccaatgggcgcggggctcttgcgatcgagcgtttgcaagtcgttctgaaggctttcatgaagcggcgcactaaggatgtcttgaagctcaatagcaacctcaaacctaacgaagcagcttccgacggagagcagaaaaaaccatccggcttccaaatcgtcaagcgagaggtgatcaaggtttcggcagagttcacaccgggtgagctgaacttctacaagcgcctcgagcagcgaaccgacaatagccttgaaaagatgatgggcggctccaaactcgactacgctggtgcattggtactgttgttgcgtctccgacagtcctgtaaccatccagacttggtgaaaagtgaccttgctaaagataaagatattctcctgcagaatggtacctcaggtagtcaacctgcagccgggaaacaggatgatctggacagtatggcggatctctttggggctctcagtgttgtctcgaagaaatgcgacatctgccaagctgaattaagccagaaagagacgaaagctggtgctagcagatgtggtgagtgtgaaacagatctgaacgttagttt

SEQ ID NO: 5128 - DNA, 143 bp, Aspergillus oryzae
aaccgccagattgtctccgcttctcgtgaccgcagcatcaagctctggaacaccctcggtgactgcaagttcaccatcaccgacaagggccacaccgactgggtctcctgcgtccgcttcagccccaacccccagaaccctgt

SEQ ID NO: 5129 - DNA, 464 bp, Aspergillus oryzae
aacaaaaaccctttgttttgtaaatacacggatccctatggccgatccgcggctcccatgttcgagtctttattcccttcgaaagaaaccgagcctcaataacgccgaccagagtcagcgtagcaccttgaccttcttaagatagccccgtaatccacatttaagcaaccaactcaacgacaccaccagcctccttgatcttccgttcagcatcccggctgaagtacctggcacggacgacgatggggatctcgggaatgcggcccttgccgagaaccttggagtagccaagaggaaggaggtcgataacgggagcagtgtcggtcttctggccgttcacgtaggcgtcacgctgctcagcgggaacgagggaccacagcttgtcgaggttgatcacgggcttccagaactgctgattggtcttgtggaagtacctcataccaaccttaccgaaataaccgggg

SEQ ID NO: 5130 - DNA, 538 bp, Aspergillus oryzae
ccgacaccgaggttctacctcaatatagcttcactgatgattacagcgaaggagctcacccacaattactcgaagctcttctgcgcacgaattccacccaacaagtttcctacggctatgacgaatacagcaatgaggcccgccggttaatccggacacgactacaagccaccgaagatgaggtagccatccacttcgtgcccagcggcacctccgccaacctgatctgcatcgccagctgtctacggccgtacgaggccgtattgacagtagacacgggccacatcgtgagcaaagaagccggtgccatcgaagccaccggccacaagaccatcgtcgtgccgggggtaagaggcaaaatgacccccgagaatctggaccgagcagtccgtcagaaccaatttttcccccacagcgctaagccccgattggtgtatatctccaacgccaccgagctgggaacagtctacactaaacgcgaactccaagaactctctgctgtctgcaagcggtggaagctcttactactcatggacgg

SEQ ID NO: 5131 - DNA, 400 bp, Aspergillus oryzae
gcgagcgtgtttcctttccaaccatcttacttaaacgaaggacatcatgtcagatcgcgagttcagttcgaacgatgacctgtcgcttcctaaagcgacggtccaaaaaattatcaccgaaattctacctccttcttccggccagaccttttccaaagatgctcgcgatctccttatggaatgctgcgtcgaattcatcaccttgatctcctccgaagccaatgacatcagcgagaaagaggccaagaaaacaatcgcctgtgagcatgtagagcgggctctgcgtgatcttggttttggcgattatatcccggatgtccttgctgtggcagaggagcataaggagcagttaaagtcgcgagaaaagaaacaaagcaagatggagcacgagtggactgtc

SEQ ID NO: 5132 - DNA, 588 bp, Aspergillus oryzae
ttcgcggcctcagggtaatctaccaccagtactcgtacagactacacgtacttatcttttcaggataatttggaacctgaatcgggagaattagaagaagatgactgcctcccttcgccctcagagactgctcccgcggctctcctctgcaacctcccgaacaacatcaggaacccggccttcattcctcgaccaaacaccaggaacatgcctcatttgccagttcagaccccaaagtaccattcgcgtaccccgggttcatcatctccagcaaacccgtcgcttcgcctccacatcttcctcccccaatgctaccacaaccgataacaacggcactatccaaaacattccggacatcacgaaccactacaccatcttccccaaaaccctcccagcagggccacctccaagctcacccttccacatctccgtcagcgatctgcgacgcgagtttctccaactccagggtacaattcacccagacaagtatcccccgggcccatcgaaacaacaagccgaggccctttcagcccgcatcaatgaagcctaccgcacgctgtccgatccactcgcgcgcgcacagtacct

SEQ ID NO: 5133 - DNA, 218 bp, Aspergillus oryzae
aacatatcgtacgctgacggcactggagccgccggtgattatgttacggatactatccacattggaggtgctactgtcaaggacttccagttcggggtgggttactcgtctagctccgccgagggtgttttgggaataggatatacaacgaacgaagtccaggttggccggctcggtaaaagtgcctacgcaaatcttcctcaagcgatggtcaaaac

SEQ ID NO: 5134 - DNA, 550 bp, Aspergillus oryzae
gcctgctgctccgaagaagctgggcttcggctctgtcgctcctgctcggtcagctgctgacgaagaggagctaaaccagaccaagtccaggtttggtaaccagaagggtatctcgtccgatgagttcttcgggcgtgatagatttgatccctcagcccaggccgaggctaaggagcgcctccgccaatttgatggcgccaccgctatttctagcaactcctactttggccgaccagaagacgatttccctgctgcagatgatggatatggagacttggaaactgcagccaaggactttgttcgtcgttttggcatgacagcgggagacgaccttgagaatcttacacaactcgttggagacagcgccgtcaaactgcaaggcgccatacgtaactacatgaacagctaaacggatacaactaatcgatcaacaccgcggcaaccttttcaatctccaccttcggacaccattactttgccatgattagccagttcattggctatcactttggtggcggtttttatccctatccctttagaaagatatcct

SEQ ID NO: 5135 - DNA, 425 bp, Aspergillus oryzae
gcattctccgcaatcctccatttatatgagttatgatggctgcaagtgacactagctcgggataggacccatagaagatgatgatctgctgaaatccttgctcttgtgaatttgagagtctctactttatcaatgaaggcttatcaaagttgatgcccccacatccgccttcagtttcagccccgcgatgatgcctacgagtttaccgacaatggttttgaactcgcctaagcccaagcgcagcgcttcagaagaatccgatagctatagcccttctatatcatctccatccagcgtctcagctcctagcctaccagaagtgaagcttcgcgaggaagaagagttagggagatataagtccccgagccgccgttgctggtcggctagggcagctagccatacgtggggaccacttcccgacaccg

SEQ ID NO: 5136 - DNA, 217 bp, Aspergillus oryzae
aggaaataaagtggcggcacaatgctgttttgaagcgggatcaaccccagatcggcctccgtgatgcttatcgtccaactggaattgccgatgagaatgtgaaaattggcccgggtttttccccttcgcccgaaatcattcgacttctcctcactgatgctccgatgggctggatttccaacggagacacgaaaaagaaccatataattgaatccta

SEQ ID NO: 5137 - DNA, 505 bp, Aspergillus oryzae
tgagcctacttccacctctggagaaagctatggggttgatgcgaattctacagccctgacaccggcgcctcagggtaatccttgtattgctacagacgccaagatcgagctgggtgtccaccgaatggcggaggccactttgccacaggagaaggaagctgtggagaaaaatgctccaccacatacgtcgcaccccagaggttacctcggaagagcgaaggaggggatgtatgtatttggatccacagaagctgagccaggcatggcgacaaccgaaccctccgaggttgggtatgggtctctaccaaccagtcactggtctgttcatgagcaacgcgatttccctcgcctgctagcacactttggccgtgacttcgagggcatctcgaatttcatgaagtccaagacgccggttatggtgaaaaattactaccagcggcgccttgactcgggaaacagatatttcgaagagactgcgctgacggcggaggaaaggaaatctcgc

SEQ ID NO: 5138 - DNA, 466 bp, Aspergillus oryzae
cgcaaccaccgcgtcctcggccgtttcttcgacaactcacttcacccaacagaaacgcaatcatggctgctgtccagggagctatttcgaagcgccgcaagttcgtcgccgacggtgtcttctatgccgagttgaacgagttcttccagcgcgagctggctgaggagggctactccggcgttgaagtccgtgtcactcccaccgtcaccgatatcatcatccgtgccacccacacccaggaggttctcggtgagcagggccgccgcatccgcgagctcacctccctcatccagaagcgcttcaagttccccgagaactccgtctccctctatgccgccaaggtccagaaccgcggtctctccgccgtcgctcagtgcgagtccctccgttacaagctcctcaacggtcttgccgtccgtcgtgcttgctacggtgttctccgtttcatcatggagagcggtgccaa

SEQ ID NO: 5139 - DNA, 488 bp, Aspergillus oryzae
cattcctaccactgcaccgacgagatttggtctccgctgaagaggggaacaaaacatttgtaggagacacgaagtctaggatcaactggcggaaattcgaggtgatgggggaggttgtcttaggtattcagcgcagccagaagacgccttatccccatctgcataggtatgaggaagcagccaggctggtactcgatatcaaattatcgggtgacgatgaggatttatatgcacgcagttcccaggtcgagccctccgctggcggcgagacggggcgcaaaaagttcggctggttacggtcgtaaggcgcgtgatggaaaatttcccttttctcatatttctgttgtcacccatgtccatgagggtaacgattatatgacccagtcatacacttgtactgacgagatgcctgatgaatgatgatgatcgtctggtctatgttgtacatacatacatattgacatgtctaaatatattattactgcaac

SEQ ID NO: 5140 - DNA, 571 bp, Aspergillus oryzae
cctcgtgccgaattcggcacgaggcggcacgaggcggcacgagggcatgctgcacttttcctagaatagtcaactgccaacgcatctattagcaccatggctgctaatactagatatgagccagctcctcagcgggactcgtttgaggagcgcggatacactcagcccccgccatcttatcaggcaacggccgaatactcacaagcgcctcgcagtgaggacgacaatgttcccgatgacttcaaattcggtggaatggtcgcagaaggaacgctacctatccggatgcaatttgtccggaaggtctatgccatcctaactgcacagctcctgttgaccaccatcatgagctcgatctccttcttcagcgacagctaccgcctatggattcagtccaacttctggctgatgatcgtctcagtcttcggtgccttgggttttatgctcgtaacatactggaagcgcaagagctacccggccaaccttcttttcctgactgctttcacggttctcgaggcctactccatcaattgtcgtgacatccttctatgacgcgcgcatcgtagtgcaa

SEQ ID NO: 5141 - DNA, 319 bp, Aspergillus oryzae
agtaatcttttctgtgtctagcccttttaggctcccctaattcacaaaatggccgacccccgtgttgaagaaatcgttgaggaggagactcccaagcagaccgttgaggatgctggcagcgactccgagtctgaggctggcgaggccaacattcccgccggtgctgccgtcaccatccactctcgtaacgagaagaaggctcgcaaggccattggcaagctcggcctgaagcacgttcccggcatcactcgtgtcactctccgcagacccaagaacatcctcttcgtcatcaaccagcccgatgtctaccgttccccct

SEQ ID NO: 5142 - DNA, 472 bp, Aspergillus oryzae
attctcaattggatacttcccaagtcacacacaatggcatccagcgcagcaagtcagcggaccgaatcggtctcctcccacagctacaagaagtccctttccaataaggccgatccaaatgccgccctgagagaagagcagccgattgccaatgcgatcggtggtacatccttgttctctttgcgatccatgcagcatcgcgatgcaaagggcgagattatcaccgatccggatcgctccaacccgactcgcccccgactggaacgaccgctcgataccatccgtggcttcgaggcggccattgaagctcgtcggcgagagaatgccatgtaataaatggaaattgggactgggaattggtgttatcttgggagttgcttttgttttccgaaaatgatatgatgggaatggttcattgagcgattgtctgtatgtatattatgactgggaccgtgtgaatattatattattt

SEQ ID NO: 5143 - DNA, 293 bp, Aspergillus oryzae
ccatcttcgacctcaacagctgcacggagacaagatgaccaagcgcactaagaaggtcggtatcacgggtaaatatggtaccagatacggtgcctccctgcgtaagcaggtgaagaagatggaagtgtcccagcacgcccgctacgtctgcaccttctgcggtaagaacaccgtcaagcgccaggctgttggtatctgggagtgcaagggttgcaagaagaccgtcgccggtggtgcctacaccgtctccacccccgccgtcgctgccacccgctccaccatccgtcgtctca

SEQ ID NO: 5144 - DNA, 517 bp, Aspergillus oryzae
cctcgtgccgaattcggcacgaggcccatacgtacatccaaagatggatacttccaccaccccgtccgcaccacagcgcccgcacttcaagcggcctgtttacattcctcctgtcaagggcaatattggtaaatggtacctcccaaccatggggatgatagccctcggcttcggcgtctacaattactacaacgcccccactcctgcctacgaccccgaggaagcagaacgtctccaccgcaacaaagccttgatggatgcatacggagacaaagagaccttacaagatatcgagcgcgcgttcgctctctacgagattcagtaatctctgactgtctcgacgaatgatcatgatctcggactggttctgataggataggatactgcatttgtggagtttgggtgcttggattgtagcgatgattttggtttatttatgttattattttatttaacgtgagatctgggatcttggctgtatgctggcatatgagttaattatatttttttttatctg

SEQ ID NO: 5145 - DNA, 590 bp, Aspergillus oryzae
cgcttgctgcaggttcttgctccaacgattgacatggttgattacagcgggcgaacgattcttcaccatatcgccgtaatggctgcaacaggcggcggcggccatgtgtcagcgaagcattatttagagggcttgctggaattcatagtccgacatggaggtagcgcgctaagccgtcaaaccccaaatgggctcgaaaatggagcaaacactgaacaacctggtgaggttataacgcttggtcgattcatctcagaaatcgtgaacctccgcgatgatcaaggagacacggcactgaatctagcggggcgcgcacgctctgtgcttgtaccgcaattattggaagtgggtgcagaccctcatataccgaatcatactggtcttcgacctgcagactatggcgtgggtgtagatatggctgatggaaattcacaatctcagcaatctggaaccaagaatgattcctttatggaccaactagccaagactaagaaagaaattcttgatgcaacactagcccagattagcacgatagtgcaagaaacactagggagtcttgacaaagaactggccacgaatctcgctaaaaa

SEQ ID NO: 5146 - DNA, 582 bp, Aspergillus oryzae
gtccgactcgtcattgagactgaagagcagaagcgcaaggagcttcttaagggcgccaatgttagcgacgaggaggaggttggctgggatgatgactccgatgatgatactgattcgccgtctactcctcaagctaaagttgacaccaacaaggccaacgtcgcccagggctctgccaccgctgctcccgatatcaaagcattgaaacccaatgaacctcgcaagtctaacgaccagcaatctcaacctgacagtgaatccagctatgatttggtcagtggtgccaccagccgagctcctgcaagccccaaggagaaagcaaaggatgacgacagcgatgatgactgggagtaataaatggaatgaaatacgaactggtcaataaaatgggagtacctttaatagtcacaacttgaccaattacttgaccactggctggtccgattaccacttggtaacgagggtacaaggagttagggttgttgcttctttctatctacttagttggcgttgcaggatcctctctattttcttgcgttcagcgatttacgtgatatcaatataaagtgtcccgtattgtgt

SEQ ID NO: 5147 - DNA, 415 bp, Aspergillus oryzae
ggtctggaccgacagtcttgatgttctgtcgaacagcctttccccgggtatgccccagacatgctggggaagagaccaaaaaatgcaaacacccagtctcagcattcctcggaaggcgtcatcacctcattccattatcatcatcactcccccaaatgttatcattgtgccccgttcttgtcttggacttttcttggttattgttttttagactttcattgccatttttatatattactatatctttttcagtccttcccgtagtgtatgtaaatcacattgggggagaggtccgtttgaccaggtcagccttgaggtactgtgtggtaccctcatatgacagaagtgacttcgtcacatggggatccctacgaagatgaagttgatatattcttattattcaattccattccgc

SEQ ID NO: 5148 - DNA, 544 bp, Aspergillus oryzae
tacttagctcgcggggtacccaaaaatgacttcgaaaatcgcccaaaatttgaagcagccggctctggacttcttgtcctttgtcaatgcttcccccactcccttccacgctgtccaatcggcaaaggaacttctgtcaaaggctggcttccaggagatcaaggagaaagattcttggtcctccacttgtcgtcccggtggaaagtattacctgacccgtaatagctcaaccattgtggctttcgctatcggcaagaaatggaagcctggaaacccgatatctatgatcggtgcccacacggactctcccgtgttgaggatcaagcctgtcagcaacaagcgcggcgaaggcttcgttcaagttggcgtggagacctacggtggcggcatttggcacacctggttcgaccgtgacttgggtgtcgcaggccgggctatggtacggaccggtgacggctccattgtgcagaagttggtcaagatcgaccggccgattctccgaatcccgaccttggctatccaccttgatcgccaggagactttt

SEQ ID NO: 5149 - DNA, 393 bp, Aspergillus oryzae
ccgctccgagcgcgaataccactcccctgaagccggcgaaaccaaggagacagagggtgagagcaaggaagtggtaaagaaggagaacaacaagcctcgcttctgggtcagcgagcgctccgtgggcgaattccaccgcacctttactttcccatctcgcgtcgaccaggagaacgtcaaggccagccttaagaacggcatcctctccttggtcgtgcccaaggctgctgcttacactggcaagaagatcaccatcgagtaaacgagccacgagatgagacgagttacgaccttgcatgggagttgagcagtttgaacgttgccaacagtgatatttcttctttcgactttcgttttaatcgacaaccccccaagaaaaaaaaaaaaaaaaaa

SEQ ID NO: 5150 - DNA, 442 bp, Aspergillus oryzae
cctcaacgcaaccttcttcgtctggctcagcgctctgcgcagcagcagcgttctgctccggttcgctctgccattcagcgccggttcaacagcaccgactccaagcttccctggatggtcgacaacgaattcaaccgtgagagagcggctgtcaagcaccacgctgcctccaccagtggtgcgtacactcaattgactcgctctcgagcttgactgaacgcttatttggagaatttgcatgatactgacacaatgcctctttagatctctggcgcaagctctctatctacgccgttattccttgccttatccttggctccctcaatgcttacaacctctgggaagagcactgggagcactgggagcacatgcctcctcttgaggagcgtgtggaatacccataccaaaacatccgggtgaagaacttcccctggggagatgg

SEQ ID NO: 5151 - DNA, 414 bp, Aspergillus oryzae
gctatctgataagaaaacgttggtcaagatcagtatgcttgatacacggtgtagaaatgcgcaggcgaagatcgacgttgttcagaaggcggccaccgagactcctcagaagcctgttgttgaggtgtgggaaatagcgaagacaactaaggctccgcctcaaacccaaaagcttgcatcggctgcatcgcccgcacaagtagcgtcaccagcgcccgcgccaacacctacgccaacaccagcggcaggagtggtaccgaccccatcaccggctccagcaccgacaccagtgcccactccagcgcctgtcaaccagcagcaaggcccagcagcaaccggctctgtagtgacggccactcaagccaagggacctgccccagccgaagttcagggccaaggaaatgtacagcaaaa

SEQ ID NO: 5152 - DNA, 212 bp, Aspergillus oryzae
cggcacgaggaccatgccaatcaactccgcttgcgtcagatgcatttggctcttctccacctggccccaggtgggcttgtggccaggggtcgcatctttcttgaagaaggtatacccaatatacaagtaggggcgcgagtctgttactttcgccgcattggagtcctttgccggggtagagtctggcgctttctgccgattacctgaggctg

SEQ ID NO: 5153 - DNA, 368 bp, Aspergillus oryzae
ctcgccgcggcggttagcgacttctttatcccgagtgatcggatgtcagagcataagatccagtcctctgagttgcctcaaaacctgaacaacgaagaagccattgacccctcggacatttacacgggcggaatccctcaggagacaaagccgcccacccacagcaagaagctgatcattgacctggaccctgtgccgaaatttttgcatcagctggtggatgggtgggcacccgatggaagtatggtagtctcattcaagctcgagaccgatcccaatttgcttgtgtacaaagcacggacggcactccaacggtacgcgcaccatctggtaattggcaacctgctgtcgacgcggaagtgggaggt

SEQ ID NO: 5154 - DNA, 386 bp, Aspergillus oryzae
agagctctctcctccggccctactgccgacacaatggctgaaagctctttctccagcgctagcccccagctcaaggtgggcacaaaagatgataaaacttcagcatttcgaaagatctcagaggatgaggagtgggaggtgacgtcaccaactgacccgacctttcaaactgcaaattcggcggcaggtttgtcgtccgctggaaacaacctctttggaggcaacgtatttaatgaacaacaaggcgggggaatacgttttcgcaggagtccttttgccgacccttctggggatggagaagaccatgacgactttgacgaacaccctgaaggacctcgcccgacaggtgccttgaatgagggattcccgaataactacgcattggg

SEQ ID NO: 5155 - DNA, 495 bp, Aspergillus oryzae
gtcctgccgcacttgcgtactgcttggcacgtcgaccaggccatcctctctgaagaagaacggctcgttgtcatccgattcggccgcgaccacgatgtcgactgcatgcgccaagatgaagttctcttcaaaatcgccgagcgggtcaaaaatttcgccgtgatctacctctgcgacattgatgaggtccccgagttcaacaccatgtacgaactcttcgatccaatgaccatcatgttcttctataggaataaacacatgatgtgtgatttcggtaccggtaacaataacaaattgaactgggtgctggaggataagcaagagttgattgatattcttgagacgatctacaagggtgccaagaagggacgaggtctcgtggttagcccgaaggattactcgacgaggtaccggtactgatttacttcggttgttggttgggctgctctgtgttttcgggtccaatattaagataatgaaagatgtttatgaagt

SEQ ID NO: 5156 - DNA, 401 bp, Aspergillus oryzae
tttttttttttttttttatggaattggactgatccaagtcaaatgcttttggacgtgagcgtatacaggcatacacagaagcaagcaacgatggcaacaactcaaactaactacatcaaaaattcatggctcacaaggcaatggtggaatctaaaacaatgcaactgacgtagttaaagatggtcatgacaatcaaagcgaagcacaacataactcaaagcaatttatttaccctctttttattccagattctaattctttactcgtcatcttcgtcttcggcaactccttcatggaagttgcgtccatcagtagtttccttgataacgccagcacgaatacaccagtctccgaacctctcaggctcttcgccatcggaagtggacatgaaagtgctgacc

SEQ ID NO: 5157 - DNA, 403 bp, Aspergillus oryzae
cacaagcatcgcaattacttcccatcacagcctcaacccatcataacggcaaaatgtcctctggcgtatccttcaaaacaagcaacggcgtcaccatcccaggcgtcggcttcggtaccttcgctaacgaaggctccaaaggcgagacgtacaaggctgtccgtcacgcgttgaaagtcggctaccgccacctcgaatgtgcctggttctatgccaatgaggacgaagtaggacaggcgattcaagatttcctgaaagagaacccgtcggttaaacgggaggatctgtttgtgacgacgaaggtgtggaaccacctgcatcggtatgacgatgttctctggtccgttggaagattcattgaagaacttgcaattgagctacgtggatctgtttctcgtgcact

SEQ ID NO: 5158 - DNA, 437 bp, Aspergillus oryzae
ccgttctggtatatgctgacggtgattggggagcatgtgctgtcgactttcatgaacacggtcatgttcgtcgctgtgtctgcgttccatgcacgcatctccgatccagcgattggaggaacctacatgacgctactggcaactgtctccaacctgggcggcacattcccacgctacttcatcctgaagcttgtagatatgtttaccgaggcgacgtgcatccctcctagcgtgcctcctgcggcggaccagttgaagggtgaattggtcactgcacctttctcctgcgcgctggaaccggataagaaccgttgcacaaatggcggcggctcctgtcaaaccatccatgatgggtattacacgacgaacattttatgtgtgctgattggcaccgtcacctttttcatgtttatccgaccggcggtgctgaagctgca

SEQ ID NO: 5159 - DNA, 322 bp, Aspergillus oryzae
ctcaggggcaagtcatgggttcatcgtcggccatatcgtacccgaagccgcggtaggaggaccaatcgctgttgtccgcgatggggacgtggtcacaattaatgcggaaaccaacgaaattagcatggatgtctcggatgaagaaatccagcaacggctgagagagtggcaacctcccgcaccgcacgttacacgcggtgtgctggccaagtatgctcggctggttggtgacgcttcccacggcgcaatgacggaccttttctaggaaatcttaggtacatggtaataattatgaataaaaactccatacgattgctttacg

SEQ ID NO: 5160 - DNA, 434 bp, Aspergillus oryzae
ctcgagcaacccaacagtcgacaaaaatggggcgtctcaccgagtaccactgtcatcgggcgtcatctgcccaccgaggctaaccccacgcccaagctttaccgcatgcgcatctttgcgcctaacactgtcgtggccaagtcccggttctggtacttcttgacccagctccgtaaggtcaagaaggccaacggtgagatcgtcagcctcaatgtcatccccgagaagcgtcacctgaaggtcaagaacttcggtatctggatccgctacgactctcgctccggtacccacaacatgtacaaggagttccgtgagatgagccgtaccgaggctgttgaggctctctaccaggacatggctgcccgccaccgtgcccgtttcggctccatccacatcctcaaggttgttgaggtcgacaacgccgactccatccg

SEQ ID NO: 5161 - DNA, 413 bp, Aspergillus oryzae
gtgtcaaggagagatctgtatcgagaagggttgcaccggtgcagactgtcagaatagagtctgtgttggagatgattgtaaacccacaggatgcactgggcccgactgtgataagggccattgttcggggaagaattgtcaagatcatgggtgtgttggcaaggactgcgataaacaatccgggggctgtttcggaccattgtgtctttcttggggctgtctgggcccacagtgctccagtactgacttcgtctgtactgggcttcactgccgcgtggtatcttgctcgggcccaagttgcaagaacggtaactgcactggcccgggctgcatgacagaagatggggactgtgaagcgaaggaagcggagtcctgcactgaatggattagtagtaccatgatgactccagcct

SEQ ID NO: 5162 - DNA, 410 bp, Aspergillus oryzae
ccctctcatttcctcctcattttcttctcttcttgttaattaggtttattcctattcatctatcaaaatgatcatttacaaggatatccttaccggcgatgagattatctccgacgccttcaacctcaaggaggtcgacaacatcctctgggaggtcgactgccggaatatcacgataggggaccgaaaatatccagcttgagggtgccaacccctccgctgagggtgaagacgacgacgctggtggtgccggcaacgcggagcaggtcctcgacattaagcacaatttccgtctcaatgattacccgaagctcgagaaggacgaatataagaaggccattaagggctacatgaagaaggtcctcgccaagctcgaggagaaagaaggcccccgagggagactatcaagg

SEQ ID NO: 5163 - DNA, 591 bp, Aspergillus oryzae
caacggtttccctggtctctgccgacaccatgacgatacccctggctcggttcgtgaaatgcattggttggaatctggtgactggatcaacgacggcgggtctgacattggtaccaatgcgggactaccattagacgatatcgaaacgacagctcaatgcttcgagcgatataagtttgatgcacttttcgttattggaggcttcgaagcgttcacagccgtcagtcaactgcgcaaggcgcgaaagcaataccttgccttccggattccgctcgtccttctcccagcaagtatgtcaaataatgtccccggcacggaatactcccttggaagcgacaccagtcttaatacccttgtttatttctgcgatgttgtcggcaatctgcgtcctcctccgggcatagcgttttcgtcgtggaagcgcaaggagcccgagtaccaggcgacagctgctgcgctggcccgcaggagcaatgaccgtgtatacgcctgaacgaggaataactctacaaagcctctccaatgatattgaacatccaccatctacagtacaaccgagattgcaaatatcatcaaacatgaggccaagaa

SEQ ID NO: 5164 - DNA, 297 bp, Aspergillus oryzae
cggcacctctggccacaagcctgaagcttctgttcttgctgccctccttggtggtgagtccactatcaagtggactcctggcttctccctcctggctcaggctactcagggcttctcccaggtccgtgcctctaccaagagccacacctactctgatgctggcctcttcactatttcgctttctggtaaggccgatcatgttgcttcagccagcaagaatgctgtggatgccctcaagaaggttgccgccggcgaagttgctagcgaagacatcaaaaaggcaatcgctctggcgaa

SEQ ID NO: 5165 - DNA, 195 bp, Aspergillus oryzae
caagattgttaagtctggtacaacatctataattaacttcgtgacaaaactacctccgctgaactacaccaccagcttctcgtcaaacacaatgtcttcctcctctttcgataagcagaatcccggcctacttggtggggtcggcgataacctgggcaagaccgtcgatggagtaactggtaccctgggcaccgg

SEQ ID NO: 5166 - DNA, 414 bp, Aspergillus oryzae
cctcgtgccgaattcggcacgaggtaaatacgtcgatttgtgtataatcagtcaataattttggcgacgatgcttatcgatcattttttcaagtccaacgcgtgtttcagttatgaaaccctgcgcgccgcagggtacagtaattatggtggagcagacctcggagaagtgatagcgatcacctccaaaattcgagcgggaaacgaggatgactggctagtcgaatggaaaaaagcagccgaccgagcattcactagtgcagagcaatcagcatcagtcaacaacacagtcagtgcccacgagggatacctgcgggcctcgaattactataggaccgctgagttcttctgtcgcgatgactatgacaacgacgaaacggcacagctcgtgtatgaacgatcagagaccgcattt

SEQ ID NO: 5167 - DNA, 363 bp, Aspergillus oryzae
ctgaggagtcatccaccaccaccaaacatatctgccaaaacacctctagctacgtgatgatcaatacttcttttgtcaatcttaacgtgggaaggtatgcgtaactgcttacaatgcgacacccaccaggcctcgtatatccgtaccaatatgccagagcggacgacgtgggcttattaaagctaggactccggacctcggctgtggctgccgtgcccggagtgtcttggagcatgattcaaaccttacagattcacagatctccgtagagaaccgacccgtacctaggacctaggcagttgtacttttggttgcaaatacctatctatggttggctaactgaagctggagcgagatagtgtt

SEQ ID NO: 5168 - DNA, 316 bp, Aspergillus oryzae
gaggacaacagattcttggctgctgaactcagacagactgacggtaactggcgtttcgcgcgagtagatctaaatgagcatatcggaaacgagaatggccactttcaatggggtggaaggaacttctccgagactgccagaaacgttcacttcgggttcgagggcggtgcacatgtccctgtgctccgcgccgaattgcgcaccccggctggtacatgggagccgcgcgatgtcaaccttgacgaacgtgtcttcaataacaatggacactttgagttccagtactaatttgatccctatatcatgatatcatttt

SEQ ID NO: 5169 - DNA, 444 bp, Aspergillus oryzae
tcctttaattgctttttaaaactatcgatcacatcaatggcaagcacgtcaataccatacgttcttgcggcataccgacacccagaagacctagaaacattggataatgatatggatgcctcaacgccatgtgtcggggcgcagcgagcgagtatctgcgcaagggagggctttgatcggggtctgggaacgggcgttccgcggaacagtatgtttctggaccgtttttggaaggcgttactgcttccgaggcggccaaagccattgaggacttctcggacgctctcaagtcgtgttctgacacagcagatgacttgggtcccaagggtcactttgcacccttatggggaattgtttgtctggctatgggcatggatgctcgccagacagcatatgtcttcatgatgaaccatgccaaggcagtcttaagtgctgcggtgcggg

SEQ ID NO: 5170 - DNA, 241 bp, Aspergillus oryzae
ctccagtgctcctccgagtgctcctccgagtcagccaccatcacgcccgttatcgcacgagcctctagctagtcaactcccggatcgatctacactagacccgagcgcgtacaccctgagcaacggcgggccgtcatcagggtcgagtcctctaagctcagcagtgcaggggttaattcgggtagaagacgttcggttcaagttccagagcgaaggtttactccccaagccgcggcctttt

SEQ ID NO: 5171 - DNA, 270 bp, Aspergillus oryzae
gtgacatcaagggtcatgttttccggaagaaatgagaaagaaagcaaaacgaaatggccactgggtaggcctcactcggtttcaaataaactgggcccatgcagagatctgacatcggcgttgatcttaactccagtagcggtaacgaactaggatgattgattgattggttttgcacgtaaccgaaaaacacccctctagagatgccacatgaatcaatccgtccacaagtcaagtgaagcgggagatccacccaaggaattgctgcga

SEQ ID NO: 5172 - DNA, 492 bp, Aspergillus oryzae
gaatctcaatggttcccgtggaaaaccggcttctgaagtttttcaccattcacgaactgatgcgctggccggccattggacagcaattcggcccccatttgtgcaataccgatgtattcagccccaagcccagccagtccgcagacgaccaaccattcaagcggtggcaagatcttcggaagcgggttattgaacacaatgttcgtgttgtggccaaatattacacgcggatccagatgggccgattgactcagcttttggacttaactgaggaggagacggagaagtacatcagtgaattggtcacatcgaagacaatctatgcgaagatcgaccgtcccgcgcggctgatcaacttcgccaagccgcgcgatgctgatgatgtgttgaacgaatggagtagcgacatgaagagcctcctggggctcttggagcgcatcgaccacttgatcaccaaggaagagatgatggcccgtatcctccccacccggg

SEQ ID NO: 5173 - DNA, 552 bp, Aspergillus oryzae
atttcataatccaattgatcgaaccgctttttatcatcggatagatttgcgattgtctggcttcatttgtccgcttcttgaaccgcagaacatctattataataactggagctagactgatactttgagctcgccaacatgtggatcctacccttactaggatatttgggggttattgtggggttctcatttcttactttggccataggtaagatatgtgtgttgcctcataacgggtggcagctaggggctgctaagttgggatattttgccagtggacgtgaagcgaaataaatcgtatacagctgtgttacggctcaattgccaacaagcggcttcaatcgtattgagactgcattggactgacgaatctttagcttctgggctctactatatgtcggagcttgtagaagaacacactgttctcacccgtcgccttttgactcggttgatatacagcattatcctcatccagatcctcctattccgtatttgaccggtttcctttctctctatcccttctcggcatcggttcgcacatcgtttatgcca

SEQ ID NO: 5174 - DNA, 362 bp, Aspergillus oryzae
ttcgcaaagaggccgccaaacgatatgcgcttcgcaagaactatttggactcccttacacgaagtacatctcctaagggtcgacaacgcgtccgcttcgaagaccgtgtcaatgtttataccacgggaacagatgtcagaacgaactctcaggagttcctgcaccccggtcatcatgagacatcaagtgagcagcgcttctggtcttgtgccgcccaggacaccgcggacgccggcgttcggttgattaaagccctctgcatgggagatcgggtgcaatcagagaataagtccgagaagataaaaaagtgcgcatagagtgcgcccatacagcccaccttgaacgatcgattcctttttttt

SEQ ID NO: 5175 - DNA, 407 bp, Aspergillus oryzae
cacaacaaaccatgacgtcaaccctccagcgaaccctatacaactcgacatatcgcccgcgactgaacttgtctctcagccaattcagcaggccgaacctctattgtagtagctccatacacttcttccaatcacccccaagagccatgccgacgtaccctggatcgtgttactgccgggatatcgagtacgaactgtccctcgcctcacccgatgacgcacggacttctctctgtcactgtaaaagctgcaaaaaagctttcggaacaaactacggcctaaccgcgaagatccccaaagacgctctccgactcatcaaaggcgcccccaaggaacatgtggccgacaatgggtctggatcgctgattcatcgcgagttttgttccaattgtggcaagttttatctg

SEQ ID NO: 5176 - DNA, 243 bp, Aspergillus oryzae
ctcttggttccggcatcgatgaagaacgcagcgaaatgcgataactagtgtgaattgcagaattccgtgaatcatcgagtctttgaacgcacattgcgccccctggtattccggggggcatgcctgtccgagcgtcattgctgcccatcaagcacggcttgtgtgttgggtcgtcgtcccctctccgggggggacgggccccaaaggcagcggcggcaccgcgtccgatcctcgagcgtatgg

SEQ ID NO: 5177 - DNA, 470 bp, Aspergillus oryzae
ctatagggcgaattgggtaccgggccccccctcgaggtcgacggtatcgataagcttgatatcgaattcggcacgagggaacttgaaggctcttcttgagcaacccaaagaggacgctagagaacttatttcggatcgcttcccactgcctcgtttcattgtttgtgatgctggcggctctcaggcacgtttccttttgtcgaagctgaacccatctaccacacacacaacaggaggatatggtggtggtgtgacatcgcaaaccatcttcaccgacgatgtttcattgcagacatttatggaccatttgatgaagcttgcggtttcaggaaccagctagatatgacggtgtagtgaccatcaaagggcgggttctacgttgatgcttggttcttctgtatgtttagcggctatttgtttttgtttgttaccccgcgatatagcaactacctagacacaatgaattaaat

SEQ ID NO: 5178 - DNA, 350 bp, Aspergillus oryzae
acttggttgtttttttttcccgtggcatccttttcgatatataaacctctacccattcccacccctctaacaccaccatgtccggagaaatggaagtggacccgccagtttcgcatgagcaggaggaagccccagcgcaatctggcggcggctttgagccacgaacccaggccggggccgttgcagtgcgcagtatcgaaggatggattgtgatcgccaccaacatccacgaagaatcctcagaggaagatgtgaccgacctgtttgctgagtatggagagattaagaacttcaatttgaaccttgatcgtcggacgggttatgtgaagggatcgccttgatcgaatatt

SEQ ID NO: 5179 - DNA, 377 bp, Aspergillus oryzae
cggcacgaggaaagaataacgcggaaaatggctacgaaaagggtagtcgttgcgggcggaagcggttttctaggctcgaggatatgcaggtctgcggtagccagaggctggtcggtaacttctctcagccggaccggagagccacgatgggatgcgatttcgagttcgcccgaacgccctagttgggcgagctctgtagaatgggctagagcagatatgctgaaacccgagtcttacaagcctttcttgagcggtgctactgctgttgtacacaccatgggcattatcctagaggccgactacaaaggcgtggtgcaaggaagagaacccatcattagtggcctacaaagggccttcagctcctccaaaatgggcag

SEQ ID NO: 5180 - DNA, 532 bp, Aspergillus oryzae
tctcgctgtgcgcccagttcgaggaagatcgccgtatgcaggagcttcaatacacagaccgttacaagcgtgcattcatgacagtgaagcaccatgtgtttatagacgcggaaggacgggtgggcccgatggacccagagaacacctcttctgacatgcacgagctgatcggccagcgtcttcccgaagaactctacttttatctctcaaaaggtgtcttgggcgctgatgtgcccaactacctgacgtctggcgaggtcgtggtgtctcggcctttgggcgtggaagatacagaaatctatcgccaggttgccgggaccactcttactccaattagaacccaagcgatatgcctgctttctaattccctccatagattctaccagactaaagtgatccaagtgcgtacttggtatgaccagaggtccgatacatcaagtcaaaccttaagtcttttgccttcggtcaaagatctattcagtcttggaagatacgttattgaccagctaccggaggggttgaagaaactgca

SEQ ID NO: 5181 - DNA, 556 bp, Aspergillus oryzae
ctggtgtatcgaatcgcttcaacgtccaccatcgtgctctatcacttcaaacacccgtttgacgcgacatttccatctctgcgaccttaaatctcgacgcttttcaaaatgcctggtggaaagggaaagtctatcggcggaaaggctggttcaaaggactctgcggggaaggctcagaagtcccacagcgcaaaggccggtctgcagttcccttgcggtcgtgttaagcgtttcttgaagaacaacacgcaaaataagatgcgcgttggtgctaaagctgccgtctatgttaccgccgtgttggagtacttgactgctgaagttctcgagcttgctggaaatgccgccaaggacctcaaggtcaagcgtatcaccccccgtcacttgcagcttgccatccgtggagacgaagagttggacactctcatccgcgccaccatcgctttcggtggtgtcttgccacgcatcaaccgtgcgctgttgctgaaggtggagcagaagaagaaaaacaagactgaggcttaatttacggcggataccccacgaatatggcgtt

SEQ ID NO: 5182 - DNA, 431 bp, Aspergillus oryzae
ttggtatatagagcggggccaggactacctgatttccctctcgcgtggtggtttgttttggagcattcttctataaagaggacattggtgatgcagagcggccgttccgaaccgttccctctaccaagtaatggagaccttggggaggcaccgggacttcaaagtggctgggcgacagatgcagacggagtcatcttgtcgaaggttgcacaccctatggtattgaaaacacttttacgacttgacgtttctctgctggacacgagcatccaccgtgccacagagttcgttggatgctttttattccatggcattattattaattataatcccatcggtagcgttatgatttatgaagaactttgtacattacttggtttgattcttgtgtatacatcttggcttggacaatttcaatgacctgattactt

SEQ ID NO: 5183 - DNA, 402 bp, Aspergillus oryzae
catatttgaactcatataactacttaacgcatacacaaatgctcgggtgacttttttattcgacagcgtcacacaggtaagttcggtaagtttaaacacccccaattcaagtctatctcttttttccctttgctttgtactttacgtcttcgtacacatcaatggcttccctatccgccccctccacccctagggcagcatcttcgcctgtagctacttcagacgagtctcgaacaccaggaaaatggcgacacccacagttgaatgaaatagtccggcgacagaatgctggaacatttggagatagtaatatcaaaagagttctgtggaatggtgccgctctgctagcaacctggatctttggcaacacctttaaatcctattctcttcgactcgaagagt

SEQ ID NO: 5184 - DNA, 446 bp, Aspergillus oryzae
ctgcagaacaaccagcattacagagtacccatacctttcttggtacaatcaccaatggctcttccccccaagtttgcgggtcacagattgcgggctggtactgatcagctcccgcaacacacacttgaactttatcttgactatgcgtgtcccttctccgcaaagatgttcgatacgttctacagctcagtcagacctacacttgcaagtcaataccgaggccagctgcaggtcatttttcgccaacatatccaaccctggcacccatcatcaacattaatgcatgaggcgggcgcagctgttctgagagtagctcccgagaaattctgggagttcagtgccgctttgttcaaacaacagaaagatttctttgatgtaagcgtggttaatgagacacgcaacagaacatatgaaagattggcaaaggttgctggacatattggagt

SEQ ID NO: 5185 - DNA, 278 bp, Aspergillus oryzae
gttcaacttcttcaacctgtacagtcaattctcgatcgcccgggtgaatgccgcggtccccggtcaatgggctggcttggtgactgggtctgcgatcggtctggtcggcactctgtacgaagcgatcctgcggaagtagatccggtgtgtatatacgggaatggtttttgcagagccactggttggacgcagttttgattgagtaggacgtgttccgtacagaggaaaagcatgcgagtgtctgcaggaggggttgggagaagggtttctaccgccta

SEQ ID NO: 5186 - DNA, 525 bp, Aspergillus oryzae
cctcgtgccgaattcggcacgagggtctgttcattcatattatgccaccggcaacctggcattgtattgttcacttgacttcggcggagacattgaaggagaggttcccagcgatctacgacattaagttcagtgagcctgggtcgccggaccacttctcgctcctgtctatgatggtctgggcaacagtaccctatacgatatggcagttatcctatcattgctttatcaccgtgcgacgtgcggagcagattgccgcaggacgcccgactagcttcacatggctccgcaaatcatatgccaaggcctggattggtaaaatagttttaagcttgcccgaatcgttacaggctcctgcctttatgttgatccaatacttctatgcgatttttgacgatgatcccatgcccgctctggctatggtcccgctgggctagcgggctattcctgactgggctcttcatattgagcatccacaatggcgcaacatactacattgatgtttttggcaagcggttccagaaa

SEQ ID NO: 5187 - DNA, 465 bp, Aspergillus oryzae
tggcgcacaaggcgtcttcttcaacggcttcttcctctcctacctcatgtcgccccgcatctgccaccgattcgttggctaccttgaagaagaggcagtgctcacctacactcgagcaattcaagatatcgaacacggcaaacttcccaagtggaccaagctggaagccccggagattgccgttcaatactggaagatgcctgagggccagcggactatgaaggacctgttgatgtatgtccgcgcggatgaggccaagcaccgtgaagtgaaccacacgctcggaaacttgaatcaagccgcagaccccaacccgtactcggtcaagtacaaggacccaagcaaagcccatcctggtaagggcattgcgaatctgaaagcaacggggtgggagagagaagaggtgatttgagtgtttgtcatccacattatggactgtgtgaaaaatacctgtgtctttttctt

SEQ ID NO: 5188 - DNA, 503 bp, Aspergillus oryzae
cagcgacaatctagcttcgacaatggggacgtcacagcctactttgaggtccatcctcggaatattattcctatgtcttatccagatttccgccgcgttgaaattcgacctgcccgctgtgagcggaaagaacgagcgatgcatccgcaacttcgtctttaaggaccagcttgtcgtcgtgacagctatcgtgagcggtcagaagggtgatggacagaaggttaacattcatatcaaagatgccctgggcaatgaccacggtcgcccgagggacgttgtaggcgagactcgccagacattcacttcttcggaggataccgctttcgatgtctgcttcgagaacaagcttgagggacggtctggtgttgccaacccttatcggtccattgaactcgatgttgacattggcgccgatgctcgtgactggtctagcattcaggaccatgagaagctcaagcccctcgagactgaccttcgccgcattgaggagatggtgcaagaaa

SEQ ID NO: 5189 - DNA, 304 bp, Aspergillus oryzae
agaattcagaaatggctatgacctcttcttttcccgcttctacctacgccactcgatcaaaatagatcagcaatccaggagaggagacaaagagagaaggatatagatcaatatactgataggattctttattcaatcgagagataaggaagagaaaaactgcaatagcatcaggtgaacaagggaggaaactaccctaagggtggacagtttaatggacatatatgattccagctttacaatctatgaagtcactggttgggttgtcaggacggacatacaaactggtggatctccggcgtgt

SEQ ID NO: 5190 - DNA, 298 bp, Aspergillus oryzae
tccgtcactgctctatgatattcgaggtcaaaaccgtgccgaaaacgactcgtggactatgtccacttctaaacgctccctcgtgttgcgtccacctatgtttcaaatggggtggtacgtgtcaaagtagggagatacattccgaattgtgtcactctctgtagttttctggaatgtgcgttgtgtagtcaagattttcaaagtatgtcgccttgggaatttgtggcgtgtttgcaaagccaaggcgccgggaagggcttccacggtctcctgcggatggcttatcgcggcaggcttc

SEQ ID NO: 5191 - DNA, 416 bp, Aspergillus oryzae
cggcacgaggaaagtcaaaccctagcccccaatgcccctccttttctctacccgtaataaattcttcccctctcttttcccaatgatcctcactcactactacacttgacactctcataatgtcccagaaagcagttgtttacacggctcccaaacaggtatccctcgtgtcggaccgtcctctacctaagcttcgcgatgactacatcctgattaaaacggtcagcgtagcattgaaccccaccgattggaagcatgttgagtgggatctcggggccactggatgtctcgccggatgtgactactccgggattgttgaggaagtaggcaaggacgtcaagaaatctttccgcaaaggtgatcgaatttgcggcgttacccatggcgcgaatgttttggagctggaggacggtgcc

SEQ ID NO: 5192 - DNA, 393 bp, Aspergillus oryzae
ctccgggttccgtccgttctaacaggtcaatctcaacaaccaaatcaatatgtcttttcgaggaggaggtcgcggtggctttgccactggtgctaatcgcggaggttccttcggtggccgcggtggccgcggaggcttccagcagccaatgggaccaccagcacaagttctggagatgggatcttttatgcatgcttgtgagggcgagatggtttgcgaatcgatcaacccgaagattccgtatttcaatgctcctatctacctagagaacaaaactcctatcggaaaagtcgacgaggttcttggccccatcaaccaggtctacttcaccatcaagccccaggaaggaattgtcgcaacttctttcaagcctggtgacaaggtctacatcgg

SEQ ID NO: 5193 - DNA, 422 bp, Aspergillus oryzae
caaccatgaacaaagaagcaccgctctcaattgccgagcgcgacttcatcctcaatgctctgcgtgaggatgtaagactcgatggccgtcaggccgatcaattccgtcccttaaatgtgtcgttcggcgaagaatacgggcatgtgaaggtccagcttggcaagaccagcctcattgtccgcatctcgtctgaagttacgaaaccccatgatgaccgtccattcgatggaatctttactattgccctggagttgacggctatgggctctcccgcttgggagaatggccgacagggcgaccttgagacatatgtgtccaacgtcttagacagggtgatccgtcattcgaatgcccttgatacggaatcgctttgcgtttttgaagggtgtcagctgctggaatgttcgggcagacgtgcacat

SEQ ID NO: 5194 - DNA, 535 bp, Aspergillus oryzae
cggcacgagggaacaaatgcttcaagcctgaatttacagacctcgaatgggaatataacatggactattttaacgcgtggtgcgagggtagaaccggcttccccattgtcgacgctgccatgcgacagatgaaaagctccgcctggatgcacaaccggtctcgcatgatcgtcgcatcctttctatcgaaggatctgttgatagactggcgacgcggagagagatactttatggaacacctcatcgacggcgatttcgcctccaaccacggcggctgggggttcggctccagcaccggagtcgatccacaaccatactttcgcatcttcagtcccttacgtcagagcgagcgattcgacccggacggggattatatacggcgctgggtaccggagctgcgtgaaatcgagggatcggctattcatgatccgtatgatcgcggcgcgggcgacttggccgagaagaacggatatccgagaccgatcgtagatcatgcgacaaggcggcgctcgccttagatcggtataagaaggct

SEQ ID NO: 5195 - DNA, 511 bp, Aspergillus oryzae
ttcgatttgctcgagaggatgcacagactgcgctggcgaaacgagaggaacttgcttccgctcgatctagtgatgcgccgctttacgatagtgctggccatattgacctgttcccttcccaaccgtcacaaaaacatacggagaagaacccagaagccgaaaaagaatcagccgagaggaaaaaggcatatgaagaccagtacacaatgcgcttctcgaatgcggcggggttccgtcaatctgtcggccagaaaccttggtattcagcttcaggaatagaagccatggctccagactccatttctgggaaagatgtctgggggaatgaggatcctatgagaagggaaagggaaaaggctcggatagatgccaacgatccacttgcggcgatgaagaaaggtgttcgccagctaaagtcggttgagcaagaaaggagaaagtgggatcaagaaaggaggcgagaattggaagcttttaaattggaagagaaacataggtcacgccatcgcag

SEQ ID NO: 5196 - DNA, 476 bp, Aspergillus oryzae
cctcgtgccgaattcggcacgagggcgacgacaatccgcctgcccaaacaccgtcaacccgccaggttttcctcgccgtcgaatcaattcaagatgactcacgagtccgtgtggtacagccgccctcgcacttacggcaagggctcccgtggatgccgcgtttgcacccaccgcgctggtcttatccgcaagtacggtatgaacatctgccgtcagtgcttccgtgagaagtctcaggacatcggtttccacaagtaccgttaaatcaaataccaactggaaattcctgttcacgaaattcgttacgtcctcggcgctcggtaacaaccttgggaaataagcggaaaggacaccgattcgattcgcttgggattccgacggggaaacagatatggaataataaaagttgttggaggaaaatcatgcacggatgccggtgttgacaattattaaaggtgtcatgtcgaacccttttt

SEQ ID NO: 5197 - DNA, 570 bp, Aspergillus oryzae
gagaaaacgaccatctttcttggatacacttccaatctaatctcatcgggcctccgggacaccattcgctacctcgttcgccatcgtcacgtttctgcaattgtcaccacggccggcggagtggaggaagatttgatcaagtgtttggcccctacgtacatgggttcctttacggctcctggggctgggcttcgtgcgaaaggactaaaccgcattggcaatctacttgttccgaatagcaattactgtgcctttgaagattggttaatccccattctggataaaatgttggaggagcaagaggccgccaaaaagaaggctcaacagaccggtgatgaggaggatgagcttcactggacgcccagccgtattatcgagcggttgggccgcgagatcaaccatgaggattccgtgctttactgggccgcgcgcaacaacatacccatcttttgcccggcgctcaccgatggctccctaggagacatgctgtatttccacactttccgatcctctccacaacgcctgcgggtggatatcgtggatgatgtgcgtcgcattaacacgatggcc

SEQ ID NO: 5198 - DNA, 520 bp, Aspergillus oryzae
taacatctacgcgagtgttcgggtgtcaaacccgtacgcgcagtgaaagcgaacggaggtgggagccccctcgtggggcgcaccatcgaccgatcctgatgtcttcggatggatttgagtaagagcgtaaatgtggggacccgaaagatggtgaactatgcctgaatagggcgaagccagaggaaactctggtggaggctcgcagcggttctgacgtgcaaatcgatcgtcaaatttgggtataggggcgaaagactaatcgaaccatctagtagctggttcctgccgaagtttccctcaggatagcagtaacgcgaattcagttttatgaggtaaagcgaatgattagaggcattggggttgaaacaaccttaacctattctcaaactttaaatatgtaagaagcccttgttgcttagttgaacgtgggcattagaatggagcgttattagtgggccatttttggtaagcagaactggcgatgcgggatgaaccgaacgcgaggttaaggtgccggaat

SEQ ID NO: 5199 - DNA, 617 bp, Aspergillus oryzae
cggcacgaggcggcacgaggcaacacattatcatcgacaaccatcgacttttatctattttcatctcaaagtcgactaaatccatcaaaccttatctctaaagatggccagaactaagcagactgcccgtaagtccactggtggcaaggcccctcgtaagcagctcgcctccaaggccgcccgtaaggctgctccctctaccggaggtgtcaagaagcctcaccgttacaagcctggtaccgtcgctctccgtgagatccgtcgctaccagaagtccaccgagcttctgatccgcaagctccccttccagcgtctggtccgtgaaatcgcccaggatttcaagtccgacctccgtttccagtcctccgccatcggtgctctccaggagtccgttgaggcctacctcgtctctcttttcgaggacaccaacctctgcgccatccacgccaagcgtgttaccatccagtccaaggacatccagctcgcccgccgtctccgtggtgagcgctcttagattattctctaatgagtccggtttttctggttgtctctgggtaggcgattaggggttttatttctttttcacgactggcgatacatgatgggttctttttttt

SEQ ID NO: 5200 - DNA, 259 bp, Aspergillus oryzae
gttgcaggtggtctcacgaacgtttgcgcagccggcggcgatcatccttgtgaataacagcgtcacggaccctcgcgttctgggaaccgtccatggcgtggcgcagagcatcgcgagcggcgcgcgtactcttggccctatgatcgggggatggggcttaggactgggactcaagtacaacatggtgggcggcatatggtgggccctggcggcggaggccatagtaggctggttcttactttggtcgatctatgaggat

SEQ ID NO: 5201 - DNA, 312 bp, Aspergillus oryzae
caagtttggtattcggatagagaatgttatcatggcgcgtgaggtgcaaaccacgcacaagtttggggataaaccgtggctaggcttcgagcatgtcacaatggcccctattggtcgcaatttgatcgagccatctcttctcagtgatgctgagctcaaatgggtgaatgactaccaccgagagatctgggagaagacccaccacttcttcgagaacgatgaatacacacgcagctggctccagcgggaaacacagcccatctctaaatgagctagcgagctgaaacaacggcgggcagtaaactataattg

SEQ ID NO: 5202 - DNA, 395 bp, Aspergillus oryzae
tcacactcacacacactctctcgcaactctttgtccaaaaggatttggtggtggtacttattttctttgattgatcaattctggctgggaattgaatgaagcgaaggagacgaactaaatcaatcaatgaacaaatcaatgattcagtctggcttgggtcgccctatttgtccaacttacttcacctttgaaccgtcaccagtcgattcttcatacataatacatcgtacagctgccgggacgccgcttccgcctgatcctcgcgcttgacctgcagtttgtcagttgggtactggccagcattacggaagattcgaagtctcttgaggaattctcgaccggtattttgtttggcgatcattttactcactgcctgttggtgtggggcctgcatt

SEQ ID NO: 5203 - DNA, 324 bp, Aspergillus oryzae
caaccagatcagacagtcaagatggctcccgcacgcaagaagtggtccaagggcaaggtcaaggacaaggcccagcacgccgttgtcctcgagaagaccgtcgctgagcgtctcaacaaggacgtccagtcctaccgtctcattaccgtcgccacccttgtcgaccgtcttaagatcaacggctccctcgcccgtaaggctcttgaggacctcgaggagaagggccagatcaagaaggttgtcggccactccaagttgaacatctacacccgtgccgttaccgctgagtaaacgtttcctcactagtcttttctcgcggacccc

SEQ ID NO: 5204 - DNA, 477 bp, Aspergillus oryzae
tcagttttcccccgccagtgaacatcttgcggtagcttcttgggacaagaaagtccgcatttatgagatcaatgatcagggacagagtgaaggaaaagctctctttgagcatgaagctccagttttaagctgctgctgggcaccggatggaactaaagtagtaggcgctggtgccgataaggctgcacgcatgctcgatctcgctgcaaatgctacgacccccgttcaggtcgcagctcacgatgctccgatcaaatgctgccagatgattccgaatcctgctggaggtacacccctcctagtgaccggctcgtgggacaagacagtcaaatactgggatctacggcaatcgaccccgatcgccacggtagaatgtcaggagcgtgtctacaccatggatgtcaagaacaagctgctaagtggttggaactgcagaccgatacattaacatcatcaatctcgacaatcccaccaaaa

SEQ ID NO: 5205 - DNA, 568 bp, Aspergillus oryzae
cggaggtaggtaacaaatggcattatgtcgtcgatggtgatgaatgcgaaacgatagccaccaaatacggcattacactccagcaattctatacatggaatccagccattggttccacttgccgtttcctttggaaggacaattatgtctgtgtcggtattaccgacataacgagatcaacgataccaccaacgtcaaccgcacatatcaccacatcaagtgctgtcgcaacacctactctccctactacaactgctccctccccaattcaaccaggaaccccgaccgactgcgtctcatactatgaggtccaacccggagacgactgctggggcatcataaataaaaggttcacttacctgaccgaggaccaattcatcaagtggaatccagcggtgggctcatcgtgcaagattctactgggctaccactactgtgtcgcagtgaagaccgctcagccaatgccagacaccattgacacttgcaagaaatggcaccttacagaggatggcgatggctgctggcagatccagcacgactttcacatcagtcccgatgatttcaacaa

SEQ ID NO: 5206 - DNA, 620 bp, Aspergillus oryzae
tgaaaacacagaacccagaagttcagctgctgcaggttatccctgttttgctccatgtccaagtatgcatatcagttatctttgatactgacatacgttacacagcagagagtacgtatatgagaaagattgcgaggggagagcgctgcgcataccatgcaatacatgcattcgtcttagtcacttttgcctgacgctgggcttgggagatgagttacacggcacggctgtatattaaaggtgactgataccatgcgatggatgcattcggccacgtcgttttgttgcgctggatgggagactggttacttgtgttgggcgttgctcaaccaagttgtatgtagaggtcatacggtgcctggtgacatggccattatgtgttccctttctgtggtcattcgtgtgagctgagatgattactgtgttacctctctcgttgtgttggaggtggctggctggcatcttgtctggattatgattacattgttggttgcccggagttgctcggcaccggtgctggagagatgcgacgtcttgtaaccagaacaactgctacgacaaagagctatgttggtttgaaggtcagtttttgaaagaatgacattgacatcggtgcctgg

SEQ ID NO: 5207 - DNA, 535 bp, Aspergillus oryzae
ttttccaccatgattgaccctcgcccgtatcacattctaagctatggcactctactcggtgttcaagtgtatcagaccttcgtttccgggattgtagcttttagggcccttccccgacctcagtttgcttcgttgcagactgccacattccccatttatttctctcttcagacggcacttccagtgctagttgctttgacagccagcaacaatgggcagccgctcggcatctccggactcctggagaaccccaagactttgctccccatggccgcggctgctgtgactgggcttgtcaacatggtcgtacttcgtcctctgactgttaacaccatgcgtgaaagaaagcaccaggaaacccgtgatggcaagaagagttacgacccccctccccactctaaggagatggtagctcttaacaagaagttcggccgactccacggcttctcgagcttgatcaacctggtctgtctcggtgctaccatttattatggtgctttacttggcaagcgactggcttagagaagataagtcc

SEQ ID NO: 5208 - DNA, 359 bp, Aspergillus oryzae
cttcatgtagctggcgctacgaggttggtaaccaggaccactcgttcatgctcggtgtcgaggctgtggacaacatcgtcaacggcgctgttgagctgaccctcaactacccagacttcgtcaacggtagacagaacaccgagaggcgcctggttgacggtgctcaggtgttcgccaagggcaagtccctgtaagcagcacgggctgcgcgatcactatagatcatgaccggtttaatattgaatgattcaaggggtaaaatctttagatatacattatgggcaacgggagccattaatttcatttggagcgatatttgggagatgttcattgctgggcatttgatgtgaatcagcgtt

SEQ ID NO: 5209 - DNA, 485 bp, Aspergillus oryzae
gacaccattggtgtccactactctgctactctctggcgctggtaccgtaactggatgggcaaccgtgagaaggttgaggccaagtatggcaagagatggttcagaatctgggaatacttccttgcttcttcgaccatcacctcccgtcagggtggtgccacctgctggcagctcactcttgtcaagaacatcaactccacccaccgtatcgagggtatcaacactcagtacggccttaagggtgcccgtcaggctgctatcgactctgtcggtcacggcgccgtgcctagtgctcacgtcactcccaaggcataagtttgaccctggcatgtgagtactggtcacccggttgtagtttacacttacttccctgtccgttgtatgcatggacgaactatgtcctcgagcctattggatccaatgacatgattcatggagcaaccggaggaaatacctttgaaagggttaatgaaaaatgtgttttt

SEQ ID NO: 5210 - DNA, 211 bp, Aspergillus oryzae
cctcgtgccgaattcggcacgaggaggttgagtttattttatactaacattctttgttaaattccccttttttttgtccctttctaacctcgatgtgtaattggtttaattcaagatccctgtctaatattgtcgggaggtgagaggcagtatttttttctagatagtactgtttgatcacaatgcataaatgggtgttccgctggtgttt

SEQ ID NO: 5211 - DNA, 314 bp, Aspergillus oryzae
cctcgtgccgaattcggcacgaggagttactgcctgttagctcctggggtttcttcttcctctttttctcctcttctcagctcactctacaaatatactatcatatctttatactctcgatcctgtactgagtcgtaatcttcggataagtcaggtatcttgtcgcgcgacactgctggtgcctgtctgccaaaagtcttttcgctgctcaacctgcccatgcttcatttgcttctggtattacccaaatattcaactgctcacccttgcttcctgtgcatgaattctgccttgcaataagacacccaagcccc

SEQ ID NO: 5212 - DNA, 449 bp, Aspergillus oryzae
taaagtccagtcccctctatctagacaaaataccccgcaattgaacccactatcaacggtcaatcgttcattatggtccaacaaccgaaacaggagaaagtctgggcctccctaataaccaacctctcctacctcccgggcattctaaccctttcacactccctccaaaccaccgaaacagcctaccctttcatcgcattatacacttccacattccccgccgaaggcctagcagcgcttcacgcgcgcggaattcgcacccaagccgtccccagcgtacaaccaggccaaagcagagtcttcctccaggatccacgcttcaatgaaacatggaacaaactgattgtattctcgctggtggagtacgaccgcatcgtcttactagacggagatatgctggtgcgaaagaacatggatgagctgatggacgtgccactggacgggccggg

SEQ ID NO: 5213 - DNA, 438 bp, Aspergillus oryzae
caagctgtaacaattcttgtcagtactgaaaagttgctattgattcatgatcttttgattgatccaaccccgtcatggacgtattctatgcttatacctactccacagcgggatggctctcgctgcagagcatatccttgatcaccgtcccgcagatcatgacaaccttgctgttggatgagtccagatcggcttctgaattggaaatatacttcgcacgctgtctcgggtttagtttactcaccattgccgttctaacggtgatgctgacgggatcgatccctttgaactccacggtgtcggaacccggtgaccacagaggacaacgatcccaagggaccatatgccatccccacattgatcgttacagcccttttccagggattttccgccttctacgcttatacccggtacttgtcctcgggtcatactgccttt

SEQ ID NO: 5214 - DNA, 222 bp, Aspergillus oryzae
tcaaaatttttccattcttagcaatcattggtattggctctggatcctacgtcttccttgtcaagtcccgtaccggcattcacaaaccgaaacccgactctcaatcttctgattcttaaattacactaccccccctaaagatttgtctactctccgactagagaaacatggccgacactcaacatcccacccctcgtttctcgccctccgaagtcacagttg

SEQ ID NO: 5215 - DNA, 337 bp, Aspergillus oryzae
taaaatataaaaaccgtgcgacgagcccatgggtgaaatgcggctagctaatttggcgggtctaccgaggctatcgtcaattcatcctgtaatagcttgaccgtatgatgggtagaaagaacgttcgccgtacgggaggtattgtatgtctttgctggcaaacgtcggtgtagtgccaaaccaggcgttgtgcccacttgacagttacacaaacacggcaggctgcgcacagtgagctgaagatcctataggaaaactccaatgcaagccgcttggcacttgataaagtgaggatacaagcgttatttagtcttctctgtgaaaaccgcttttctcc

SEQ ID NO: 5216 - DNA, 569 bp, Aspergillus oryzae
caactaccaacatgtactgccaaaaatgtcgaactcagttaaagctggatggctctctggactcactcaatccagctgccttcgatctgcttaccagctctacaggtaaaaccgtaccggagcaaggaactgcctcttcctccagaaattcgtttcctcaagaaaggcgagacctgtacgaccgtgtgtccaagaaagttacgtctccggtctatcgaagatcaattcctgctccgcgtcaagttggcagtaaccagaacaaccctcctaggctgggacgaggagacagtgggaacatgtccttcattatgcttacggagtctcaagttgggccaccgcatgcgacaattggtgtcaatggcgacaacaccccgaaaggcaaacaacccctcagcactcaaaatgctgatcgtgaaatagacgatggatatttgcggaccaagttgagcgaacaagccgcctctttgaaataatctctctcgctctgacattgaccatccgatctgcaccgaatgcacggaaatgctcgtggacgggctccagaaacgactggtagatgccacgaagga

SEQ ID NO: 5217 - DNA, 470 bp, Aspergillus oryzae
ggtcattggattcgtccccatccaggagtatattgtcctggacgaacagtcgatcgtccgcattcgccctctcgaaaaccccttgggcattgaggatatccgtgtcttcctgggtgcccttggtatgcccggtctgaccgcttattcatccctgtacgaaatcggcaagcccaagaagggcgagaccatcttcgtttctgctgccagcggtgccgtcggtcagctggtcggacagctcgctaagcatgaaggcctcaaggtcatcggcagtgtcggatcggacgacaagctggaatatatcacaaaggagctgaacttcgacggtggtttcaactacaagaatgagaagcccgccgatgcgctggcccgcttggccccagagggtattgatatctattatgagaacgtcggaggtgagcacctggaagctgctttggatgccatgaacaactttggccgtgtcgtcgttt

SEQ ID NO: 5218 - DNA, 427 bp, Aspergillus oryzae
cttggctcctatccgctgttttagcgtttgttcaagccccttttagcccggcgcgtggcagactatctctgtgttcttacaccctgcgacgatcagaaacgttgtgttttctttggaggaaaagggatagtacagatttagcaactgaactttgctctcatattctccctttgcccacgctgcagcctgtcagctcccattcacgttcggaccctgaatcctcaccaccactatcaccgtctacatctccgttttatcgtgcccgatccgatcttctcttctcttcttctctctttcctagcatagctttgcacacgcgaagctttctgctcaaatccaaggcccgtgattcccagcatcttcactcttccaacggctatccttcctcaacatcacttcttccatcactgtgcacgattaccaccag

SEQ ID NO: 5219 - DNA, 399 bp, Aspergillus oryzae
catgaagaaccgtatcattgccgagggtggctccgtccagaacatccctaacatccccgcggatatcaaggccctctacaagactgtgtgggagatctcccagcgttcgatcttgcagatggctgcggaccgcggtgcctacattgaccagtcccagtcgcttaacatccatctcaaggagccgactatgggtaagatcaccagcatgcacttcgctggctggaagatgggcttgaagaccggcatgtactacctgcgtaccatggccgcttcggctccgatccagttcaccgtggaccaggaggccctcaaggtcgctgataccaacgtcgctcgggccaatgcttctttccggaagcgggccgtgggtgctgcatccaacacatactctgctgtccc

SEQ ID NO: 5220 - DNA, 444 bp, Aspergillus oryzae
cggcacgaggagcggccaaacgggtcccgggcgtcctttctggccccggatacaagcacattaacctcctctttcgaccagccttcgaaccttgtgaggaccgccatggcacctgcctcgaagccagtctccgcttgtaggaggttccaaaccccgatggttttctaacgcgacactgacgttagatcaatactacccagaggtcgacatggttccacatacataatacgtatcctttggccagccttcaacaggagcacggtacttctccacgtgaatttctgcaaaccctgcttcttggagtctttcacccagaggcggaccggggctgattgtaaacccggctttggtgaaaccaccacaaacaactgaatagtatttctagaccgaagtgcctttgatggagccgtcctctgagtacacgtcgacgtcccactcctgaaa

SEQ ID NO: 5221 - DNA, 336 bp, Aspergillus oryzae
gaagtctatgcttagaagcctagtgcctttgtcgtttttaagctttttgaggaggttaattccgttaacgaaccgaagcttcatgagatttaggaagccgaggccgagggttaggttgttgtcggcgaggtcgtctttgtcgaggagagtcggcctgaggaggacgaggaggtctttgttgtttatcaggcccaccgccctcacgataaggctcgggaaaactggggttcaagggtaacgggacgagaatagaacacgtccttcgccgccgagcttcgagcgaatcccgcaaaccaaattcatccggagtacacgaacccccttcccctccaactg

SEQ ID NO: 5222 - DNA, 498 bp, Aspergillus oryzae
ggcttgcgacatctacgatcccaaatcgatcccggactatgaccgagaatttatcgaccctgatgacttgcgccaattcgagaatgcgctgaacgacaacgaatccaactccttggtagccctcaacgactggcgacctatctatcaacgagttcgcaagaatcgcggtcgccgaaagaagcctcgtcgaaccaccgatgaaacgagggaaggcgtcctgtacacagtcctaaaatggccatttctcttcattgtgtttggctggatcaccgtccttggctttgcctacgcattgactcgcttttatattgtattatatgagcgatgggtctcctggaggggcaagaaggaatctctcaggcgggaactctggaagcagacagattacaacaattggttgaaagccgcccaagcgctcgacaatcacttgggaaaccaacagtggaaggagatcgatgaatattgcgtactatgatcatcttactatcaacaaactgg

SEQ ID NO: 5223 - DNA, 453 bp, Aspergillus oryzae
caaagaggataaccctcaaatccctcagcaagagaacaacaacccccaggaagagaacaaccaggggtcccctcagcccaaggaggagcaggacgttgagccaaagcaagagtctaactctgacgacgctgagcctaaacaagaacccaagtcggacgacgagtctaaacaagacccccagcctgactctaagccacaagaaaaagaattcaagcccgaagccgaacccaagcaagagcctcagtcagaagctgagcccgaacctcaaccccagcctcagaaagaagaacctcggcggcgcccacggagaccccgcccacagaagtaccaacatgactcggacacagagaacatcgaccgcggcgatatggataacaccgctgttgagaagcctcgtcgtcagcgccgctcacgccgccagcaacaagacggcggtcccctcggcggcctcgg

SEQ ID NO: 5224 - DNA, 442 bp, Aspergillus oryzae
catctctcaaggctgccgacattggaattgctctaggtagtggctctgacattgccatagaagcttctgacatggtccttctggacagcttttcggcagttgtggaagccgtgcagtatggtcgggttgtttttgataacctaaaaaagaccattgtttacttgctgcctgctggttccttttccgaattctggcctgtcttcactaatgttatgtttggccttcctcaagttctctcgtcattcctcatgatcatcatctgctgcttcaccgactgcgccgccgctaccgttctagcctacgaagccccggaagccgacgttcttctgcgtccaccacgcaagcccaagcgcgaccgtctcgtgaactggaagttaagtattccacgcttatggtattctcggtatgctggaaagtgtggcctcccttcgccatggcatat

SEQ ID NO: 5225 - DNA, 531 bp, Aspergillus oryzae
gagttatcccgccgtcatggtgttgagtggacttgcgccgccaggcacagagatgttcttttctctccgagattaccgtaccttccccggcgaagctttcgttcttccctcttagccttcaactcatccgaatcatcttcatcgaatgcaggtagcgaagaagcaggctccaatgtggcgaccccaaagcccaaatttggtgctcgctggggaaccaaacaagcacagaagccggccggtctcagcccagcagagcaagcgatgcgagatgctttattagcaaagaaggccgcagaagaacaagagcaacgacgactgcaagaaaaagagctacgtgcatcacagcgtagagcggaatcgcgggccgattggaaccgacctccaaggcgacagaacaagcgacgtcctttcgacgatggggagagccgatcactgcagcctgataaagatctagaggtaaataccagacatgtaccgagaagtctgcgtgcttcagactggatctgcccggactgtcaatataactgtttt

SEQ ID NO: 5226 - DNA, 424 bp, Aspergillus oryzae
ctctgttatcacggacctgattcgtaccaatttgaccaccgatcattgtcgacccttatccatagaacctacaggtttctcgttgacactccgtcaccatgcctttcactgcttctgatatctgcaagatcctcttcgcgatcatcctccctcccttgggtgttttccttgagcggggatgcggtgctgatctcctcatcaatatctgtttgaccatcctgggttggatccctggtatcattcacgctctgtacatcatattcaagtactagacagctctctgcatctctgtcgccatgcccgttttggttcacatcgcccggtcgaaaaactgcatcgtttcgcggtcaatagcgtgagataccaacttttaagatcgaactcgcgaccatgatgctgtcagcaatgttccgcggtgctccgg

SEQ ID NO: 5227 - DNA, 402 bp, Aspergillus oryzae
ggccctgatgtcatgtttaaccctgcgcctgctccaccgggagggttgccggaggatgtgtacgcggcggtggaccactttatcatgaacgagacagaggccgaattgatgactccaccggcggagcagctactcaaggtggttcctgatgcggagggactgagcggtaacgacaaggtggctcggtatttccatcagctgggcgtgacatacgtcctgatcacgctggggtccaagggtgtctggtacagtgctactgatgctgggacgtcagggcctgcggacggagtcaatcgctttaccaatcagattcccgccgctaaagtcagtcgagtgctggataccactgcggcgggagataccttcgtcggggcatacgcggtcggggtggcgcggtggcgc

SEQ ID NO: 5228 - DNA, 502 bp, Aspergillus oryzae
catcatcattccttgttacctcctgcatcatagacgttatctgggagccaaaaaaaaaaagtatcacagccatcatgtcaacatttgcctttgccaactctagcgaaaaggtccctggtaatgggacccttcctgccgaattcataataaaagcctctccaggaacggacgtatggtcaaaacctccatccacggagagattcaacgctccgatcctataccagagcgtcccgctcaactcattcaagcgggctagagttgccttcaatgccttttggaaagacaaatacgaccaaggtggactcacccttgttttgaatagcgcaaatggtcctcggagatgggtcaagacgggtattgagctcactcatggtagaccccatttgagcaccgttacgaaggatagatttgcggactggagtttacaaccggtcccgtcaggtggtggagcagcaacgctagaaatcgtcagagagtcagacgacagtctgtggatctactt

SEQ ID NO: 5229 - DNA, 503 bp, Aspergillus oryzae
ctgctgtgtccgtcagtcgtcaaaatgcctcaggatatgccccccgttgggggctacgggccagtgcagtacaagcgtaacatccccgcccgtggtttccgccctatcacctacctcgtcggtatgcaccttttaatgggctacggctactacaagctattccacggtatccgcgaacaaaatgaacttgcccgcgaaaaggtctggggccgtctccacatcctccctctcctccaggccgaagaggaccgtgaccaggtccgtcgtcacttcgccgacaaggcccgcgagaaggagctcttgggctctgagtccaaggtctacaacactgagcgcttcgtccgccctaccttcgtatacacacccactaaagtcactcaataagcaattgcaattgtcatgtgtttggattcgtttatgttaaacttgcatgcttgattgagcacttcggtggacgggtcctgatttatgggtacaacacaattcggagtctctgtgcgggg

SEQ ID NO: 5230 - DNA, 512 bp, Aspergillus oryzae
atcgatggttccaatcgtaagtcaatctacgagatctattaccaatatttggagatctatcctgttatgcagaccttgattatgaagtccccatattaatcatatctctgcctgtcattgcacctccaagctagcctaccattgttgctagcataccctataccgtcgcaagttgtggaactaagcaccggcaaagcagtcgaaatgggctcagcatcaagcttcgccaagaccatcgtcatcccagctgccatctccctagcgctctacctgcttctgtcgtttcttataatccctttcttccgtcgctatcaccaacgatattcgcaatatcttcccttacacaccatatctgcacatacctctacactacgggaccgtgtggctgacgcaatgatgcgtttattcctaccggcagcatggcgacaacaagcacggtttgacgaccaacatgataacattagtatctttgacgaggaaggagagataatggtcgggatggatatggatcc

SEQ ID NO: 5231 - DNA, 442 bp, Aspergillus oryzae
caattgccataatgtcgcttttcagagctggaaacttcgcctgcttcagagctggtcggcttgccgcgcctataaatgctcgtttcttgtccaccaacaccggtcgaggcgacccttccgtgaaaaccagccctgctgatgccccggcggtaccccccaaggacagctcattaattcgccaggagggccctgctgaggcaatggctcgccaccagccggattacgaggccacaattgatcacggcacctcgaaattctctcctgtgcctaagcgtgtcatggatggaagcgagcccggtgacaccgttccagctgctgttctttctggtgctcctaccgacctccaggctcgtactgtcagaatctaccgcccctcgaagcccgccacgcaatccggtacctggcaccagcaccactggcggatggattgggatgtgttgca

SEQ ID NO: 5232 - DNA, 499 bp, Aspergillus oryzae
tcacacagtgtactgaattccccataaacctttcaagtcatactggcatagctcaactatactctcccaatgcccccgctccgctccacatacactggagtcacaatcgacgcagaggaaaccctcctttgcaaatgtggctatcccatgaagaggtatacagttagggacgcgaagagcccataccgaggggaacaatatctggcatgtagaagacattccaaagacgaggaacactgtaagagctggatatggttcgatgaagcgtctcaggtagaacggctcgttcctcgtcttgctgttccgcagaccccgaagaaacagaccgatatccgggagtttgggcagttaacgccgccaaaatcgtcgggtttgaagagaaagcgggtgaacgtagatcccgggagtttggacgagctccccggggatgagattgaggatagtgacctgtcggacgacactctggactcgccgtctcagagaaggcaaaggctgctaa

SEQ ID NO: 5233 - DNA, 209 bp, Aspergillus oryzae
gcttttcgaatctaagcgcgttaagagctggttgaacagcactgtcgtgcaatacccctcgaatcttcgcagacatggcccatccgacacggcttggcagcttcctgacactcaaggcgtttctctcaatccaatgcctgccctggtgattcttcttttgggtagcatgatgggatcccaccaccaatccagcatggtttccactatgg

SEQ ID NO: 5234 - DNA, 285 bp, Aspergillus oryzae
cgacgacaaccgacgacgccgccgccaacttcttgaccaccgatacagaggttcaagacaatcaaaaatggcgaaccagagtactccaataccgccgccggaacccgtacaacacgcggtccaacaaggtccgcatcatcaagacccccggcggtgagctccggtacctccatatcaagaagaagggcactgctcccaagtgcggtgactgtggcatcaagcttcccggtgtccccgctcttcgcccccgcgagtactctcagatctctcgccccaagaagaccg

SEQ ID NO: 5235 - DNA, 500 bp, Aspergillus oryzae
gtgggcagagacatcatttaagatgagagttgagacctgccacttctgcagtcgtcctgtataccctagcaagggtatcagttttgtgcggctcgattcgaaaatgttccggttctgcagaagcaaatgtcacaagaactttaagatgaagcgccaaccccgcaagttgaagtggaccaagaccagcagagctgcaaatggaaaggaaatgatcgtcgactcgtctctcgttctgtctcagttcgccaagaagaggaacgcccccgtcaagtacgaccgcaacctcgtggccgctaccgtcaaggctatggagagagtggaggagatccgtcaacgcagagagcgcgctttcaccaagcgcagattggcaggcaagctcgcccgggaccgcaagcgcgaggaggaccggagggttgtggccgagggcgaacaccttatccgcaaggaactgcgcgacagagaagaaggcatgcccttggtgcacgagggcaagcagaaca

SEQ ID NO: 5236 - DNA, 480 bp, Aspergillus oryzae
cgacaccgatcagggccattcgatcaccatggcttccgtcccgagtgtgcaatgcttcggcaagaagaagacggctaccgctgtcgcccactgcaagcaaggcaagggtctcatcaaggtcaacggccagcccctctctctggtccagcctgagatcctccgcttcaaggtctacgagcctctcctcatcgtcggtgccgacaagttcgccggtgttgacatccgtgtccgcgtctccggtggtggtcacacttcccaggtctacgccatccgtcaggccatcgccaagtccctcgtcgcctactaccagaagtacgtcgatgagcactccaagaaccagctgaagcaggctcttgttcagtacgaccgcacactgctcgttgccgacaaccgtcgcacggagcccaagaagttcggtggtcgcggtgcccgcgccaggtaccagaaatcctaccgttaaacggcttcaaatcaaaaaaa

SEQ ID NO: 5237 - DNA, 504 bp, Aspergillus oryzae
atcgcgccttcggtgggttgcgtacagtactagaagaggaatctgaatccgaacgtgaaacgggcccagagaggtcgcaagctgacatacaacccgatttcgaagagtatcagctcttcgaacatctccacatgttgtctgccatgaattccaccgaagaagccttgaatttaggcagcggaggacccgaggctacttctgggtctgtatcccaggtcattctcactccaccgactgacgctgatagcgagacaagtgaaaacagctttttcgaacagcacgtcagtgattctgatagtgacgaaaaccattctgatagtgatgagagtggatctgatgtggctgtggaggaagaggaagatggggagagtagtagtgacgatgacaatgacgatgacgatgacgagtttggtttcgataccagctccgaagagggttatgatagtgatgagatgctcgaacctgaagaccgtatgcttcgcctcaacggcttgcgaacattcc

SEQ ID NO: 5238 - DNA, 546 bp, Aspergillus oryzae
gcagcggctataaccagatacctcagatgccaccccaggtacctgctcaagcgccgccggccgcagcgtcgggtcctcagccagtagacgccgcagatgaggtgaaatgaatctacaccatgaatagtgggcgagacgccattgcctctttagttgagcaatctaaggatatacccattgcatcttgtgaataggcgtacccgctacgctcgagtgtgcacctagcattcgtccagcgttgacaactacactatctcgcaatacccgtgccctcaatttgtttctgaaagacctctaccttggatttctgctctcacgctaccctttttgcacccagagcgtgcaatacttctggtgagcaggtactgtcatttgtactggcgattacgtgtcgtgtatcagctactttcagcgggcaaggtatatgataggcctgaggatgtatatgctgaaatatgagacgatccacctgtcgacgtttgcaggtcttcatggacttgcgacaagtgtctacctggccaccacctatactatacgcatctaggg

SEQ ID NO: 5239 - DNA, 572 bp, Aspergillus oryzae
ggtgaaaacgtctttgtcgacgaggtttccatgaccaacgccaagaatatgctagagcgatcgtttccggaaccaagacaatgccaagcccttagttggccacagtctgccatctggttctgcaacgatgaaattgcggacaatctgtctcagttaatactcctgtaaaccccatcacggtgagatcagtagcgttgcccatcatgaattgcccgtcgcgtactgatgatacgctcttgcatgtcgagtggaatcagaacccgccatttctggcgccagatctgacgactcgccaagacttgaatggaatctctaacgcccgtgagaataaggagggagatggaaatggtagtgattctggacagtcgttggcgtgcctcagtgacaaacggaggatgaattccctgccgattgatccagagaagaatctaatgtgggataatggggcgtcactgacctcgaagtcaggtatgactccttattttcgttacttccctgtgtttacttggtcggtgagtacccggctggcggcatcaatgctgatgagcatcttcaggacgtcccattgaccc

SEQ ID NO: 5240 - DNA, 483 bp, Aspergillus oryzae
gcgccctacagtcgtattctggaccttaccaaggtccagtgtcgtatcttttcacttaacttcaatccgcaacggttacgactgggaaacaaggtccttcgacagcggcttcgtggcccaacgcttgcagaatggtatccgaaaaaggctgtttctttccgtgatttacaagacagttataagcctctcggcttaaccacgttcgatgaagcagaggatgatagagaggaagcgatccaaattgcgaagcttcgaggaaagggccggccaaagaaaaagagaacagccgctgaatcgagatccgcaaagaagaagaaataggagggaaggacatacatcctatgatctcatgttaaaaataataatcttaaattttttttgtattatatctcatgttgcagtccacgtgggggttatttcgttcttcatcaggttttatctaggatatttacagatgctcattactcgcctttggtgtttgtg

SEQ ID NO: 5241 - DNA, 387 bp, Aspergillus oryzae
gacagagtaaaagagcttcacagtatcattcataatggccagtggtttgcgtatcttagtacccgttaagcgggtgatcgactacgcgatcaaaccccgtatcaacaaggcccagaccggcgtcgaaacctccggcgttaagcactcgctcaacccattcgacgaactctcgatcgaggaggccgtccgtctccgtgagcgcaagggtcccctcaaagtcgagaacattctcgctctctccgcgggcggagccaaatgcgctgataccctccgcacggcgatggccatgggcgccgaccgcgcgttccacgtcgacgtccccgactccaacgatgggggcctggagcctcttaccgtcgcgaagatgctgaaggaggttgtcaacaa

SEQ ID NO: 5242 - DNA, 644 bp, Aspergillus oryzae
ggctatagatatcttatttcactagtaatagctccaatcacgcaatcatggcggacgaaggtgcatctcctcgtgaactagtcattgaggcttgtcgtcgagaccagcctcatttgattgaacaagttctaaagggcatggaaggcaaatcgaacgaagaggtggccgagttcttcaacggcgttacagactcaatgggaaaccatgctcttcatatctgtgctacatatggcagcggtgacacgatggactgtctctttgatatacaatactttgaatgcgaccctctcacccgcctcgacaaagatacccccctccacaatgctgtgcgctacgccaacgagaaggatcgtgaaatcggactggagatgatcgagatgatgtgcgaagctggctgtgacccacgagtcaggaacaagcatggtcaaaagcccgcggaccttgtttacaacaatccagagattaagtcgattcttcagaagaccgaatacgttcttgcagagggtctaagagataactcggacaatggctctgttcatgacagtgcaagtgatagcgagtaaggactacaaggtgacttatagcgacgttgccttcttcccttcatagacatacgactgtgatgatatgccatttcttacttt

SEQ ID NO: 5243 - DNA, 412 bp, Aspergillus oryzae
cggcacgaggaaccacctatctctccacattttcccactcaaccttaaacaagttaactctttaatcaaccatcaatatgtctggccgtggaaagggtggaaagggtctcggaaagggtggcgccaagcgtcaccgcaagatcttgcgtgacaacatccagggtatcactaagcccgctatccgtcgtcttgctcgtcgtggtggtgtcaagcgtatctctgccatgatctacgaggagacccgtggtgtcctcaagaccttccttgagggtgtcatccgtgacgctgtcacctacactgagcacgccaagcgcaagaccgtcacttctcttgacgtcgtctatgccctcaagcgtcaaggacgtaccctctacggtttcggtggttaaatgctttcttttctcgccttttg

SEQ ID NO: 5244 - DNA, 547 bp, Aspergillus oryzae
ccaaacttctgctactgcctctcgtctgatcgtgactggttcttcatatgttgccaatctgatgaccagtggggcggaaacctttactaagaagaccaaacctaacccgaagccaatgacgttctctgaggctactcactcaagggttcgtaaggttggaaatctcacgcatggtgccgctggcatctcagccaagactgtcggccaggtcggtaaggttgcacagaacttcggtgcttcattaacccgtcgcaacccggacgcaaagcgcaagggcgacaaggcagtgaacggcgactacaagccgggcatactaaacaaatcaatgatcgcattctcgacactggcggatggtattgagcagagtgcccgcaccgtactaacccatggctctgctgctgccagtacgatgatcggacatcggtatggagctgaggctggcgctgtggcgagcgatttgactgggggcgtgaaaaatgtgggactagtctacatcgatgccacaggggtcaagccgtaaggcagtcctcaaatccgtagctaaggg

SEQ ID NO: 5245 - DNA, 468 bp, Aspergillus oryzae
cgactccgccgctatgatcatggtgaagaacccccgccagctgaacggtattgttgttaccagcaacctgttcggtgatatcattagtgatgaggctagcgttatccctggatctctgggcttgcttcccagtgctagtttgagcggtatccctgatggaaatagcaaggttaacggtatctatgagcctattcacggctctgcccctgacattgccggaaagggcattgttaaccctgtcgccgccattctgtccgtcgctatgatgatgcagtactctttcggtctgtttgccgaggcccgcgccattgagcaggccgtcagcaacgttatcgagtccggtgtccgcactggtgacatcggcggtaaggctaccaccgccgaggttggtgatgctgttgctgccgaattggagaagcttttgaagtaaatgagaccgaataatgggatatggaaggatgaatgggg

SEQ ID NO: 5246 - DNA, 432 bp, Aspergillus oryzae
tgcagcaggtagcagcctcttctggccaagcggctcagttcatggcaatctcagcacttgcgcattcaggtgacaatatcgtctcgaccagtaatttgtacggaggcacatacaaccagttcaaagttttcttctcccggctagggattaccgaccaaatttgtccaaggagacaagccagaggatattggtgcggcaattgatgaccgcaccaaggctgtttatgtcgagacgattggaaaccctcgatataatgtgcctgacattgaggccatcgctaaggctgcccatgagaaaggtgtgcccttggtagttgataacactttcggagccggtggctactactgccgccctatcgaacatggagccgatatcgtcgtgcacagtgcaactaaatggattggtggccacggtaccacgatcggtggtgtc

SEQ ID NO: 5247 - DNA, 539 bp, Aspergillus oryzae
gagcatagtagagcttgttcttctcacaatagcatatgaatcagtgtgcctactgggtttaagtgtatactatcatggcccatgctacacccgatttccatgccattcatagctcaagcccgattactacccttcgcttctctcagcaggcaccagtgatccttgaacgtcaattacactcagaaaaaaatttaatctctgcgttaataggtaaacaagaggagccagaaaaatatggcataatagagcaactgttcttctcctgtctacaaaccggcgatgataggtctgctctgttatgtctcgagcaattgacacgtcgtttcggctcttcgaatgagaaagtaatggggctgcgtggcctgtatgaggaggctatatgcgaaaatcaatctgatctggaggattccctgcgtaaatacgattcctacctgttggagaacccacttaatttgcctattctaaagcgccgtatcgcgctcttgcgttcacttgcaaggcctgcagatgctataacaggcttggtagagctcctaaaa

SEQ ID NO: 5248 - DNA, 446 bp, Aspergillus oryzae
agaggaatgtccggctgatcacagaacagcatgttgtaaacaaagattcgggtgttgaagggttccccctccgggcgtggtctattgagatttaccttgtcaatgaccacggagagcaagtgccggccaacgtcttcgacaaggtgacgtatacacttcatcctagtttcggggatcgggccattcaaaccttcaagaaccccccgttcaggatctcagaagaaggatggggtgaattcgacatgcaaatcacccttcacgccgacaaggatcattacgtgacacacgacctcaactttgcacagacacgctacgagtccaagcacgtcatcacatttaaaaaccccaagcctgccttattggcagcccttcgtgaatcaggccccgttcccggagacgagaatggagtgaaatctaagcgttccgcagctagcgaagaaggatca

SEQ ID NO: 5249 - DNA, 454 bp, Aspergillus oryzae
caaaccggttctcaacggcaaacagtcaagatgcctttccacaagcaagtcaagaacagcgcttactacagccgctaccagaccaagtaccgccgtcgcagagagggcaagactgattactatgcccgtaagcgcctgatcacccaggccaagaacaagtacaacgctcccaagtaccgcctcgttgtccgcttcaccaaccgcgacatcatcacccagatcgtctactctgagatctccggtgacaaggttttcgccagcgcctacgcccacgagctcaagcgctatggcatcaccaacggtctgaccaactgggctgccgcttacgccaccggtctcctccttgccgcgtacccttaagaagctgggcattgacgagcagttccccggtgttgaggaggctgatggtgagtactctctaccgaggccgttgagaccgatgacggtgagcgcc

SEQ ID NO: 5250 - DNA, 504 bp, Aspergillus oryzae
gagagagagagagaaagagactcccttcacacctctcttttccccacaatggcttcttcattcgttatcaaaacaccctgttcatctgccaatattggtcctggatttgacgtgatcggcctggcattgtcgctccacctcgaactccatgtcactattgattccaccaaagcctcccaatctcctctgaattgtgtcgtcacatatgatgatcaaagcaacagcgcggaagagatcagcctggatccagaggtaaacttgatcacccgtgtagctctgtatgtacttcgatgccatgatcagagagcgttccccgcggagacccatgtccatattgtaaatcctattcctctgggtcggggtctcggttcgtctggtactgcagtggtggctggtgtgatgttgggcaacgaagtaggccgcctcggattgagcaaggaacggctactggattattgcttgatgatcgagcggcacccggacaatgtcgctgcttctctcttt

SEQ ID NO: 5251 - DNA, 391 bp, Aspergillus oryzae
aaacaaacctccaaaatgggttccttccaccacactgcccgcaactggcgcatcaaagtcgacaacggcgtcaccttgttccgcgtggaggtcaaagatctccatggcaactgggttgaacggacaatccgtttggatgatcacattggcaacactgatggctggttcatctggggcggaaagaacttcacccaatccgccagggatatccgcttggaggatactgagtggggtcccaagctggtcgccgtgatgcgctcgaacgacggtggcgaccgtggtttacagggaatgttgttgggcgataagatcgagaacaggaacggagagcttcacttcaccggtccttgattgatgtggcagggctgtcatcgatccatgaggaaatttt

SEQ ID NO: 5252 - DNA, 430 bp, Aspergillus oryzae
ggcagctggcttcagtcctcgccgcatttcttctactccggatacaagcctgacggcgagtggtaccagttataccagattggattcggtggagtgccagctcggaatgcaggcgatggactcgactgccattgcctctttccggcaatcaagtccatccctacagaaagcattgaactgaactaccccctgcgcatcgaagccaacgagagtgtcccagatagtggagggccgggctactaccgtggtggtaacgcgcaacgcacgctctatcggttcttgtgtcgcggcgagttcagtctgcatgatgaccgctggtttacaaagccatggggaattcgaggtggcaaaccaggctcccgttcgcggaagatcttgtaccgattctcgaagtctcgagaaaacccccccgttgagatactcccctcaa

SEQ ID NO: 5253 - DNA, 171 bp, Aspergillus oryzae
caatgctgattccacccgcaggaggtaagactgccatcatcaagcagctccagcaagaggctgccatggccaatgctccgaatttgatcggaaaagtgaatgagcactgcttcgacgcctgcattcccgcccccggctcgtccatcacctccaaggaagaggcttgcctct

SEQ ID NO: 5254 - DNA, 629 bp, Aspergillus oryzae
tcctctctgagatataaaaaggaggatatggctgtcgaaatggtgttaaaacccatgatcacaaattgcaacgacttcaaagtttcatcagtgcacacctccaccagacgaagatgcccgagattgtgggcaaggaagtaggccccattggctttggtctgatgggattgacttggcgagcgacgccaccgtctcaggatcaggccttcgaggctatgcgcaccgctatccataatggaagtaactgttggaatggtggcgaattctacggatcccctgattacaatagtctcgtgctcctggaacggtaccttgagaagtatccagaagatgccgataaaatcgttctgaacatcaagggtggtttgaacccccagactcaccaggtagacgcctctccggagaacactcgcagaagtctggataactgcattgctcagttaaagggccgcaaacaaaagattgacatgtttgaattcggtcgccgcgacccagctgtgccgatggatgtcacctttgatttgatcgatagggagtatgtccagactggaaagatcgggggcatcgccctgtcagaggtgcgggctgagaccattcatgaagcccgtcaaacacaccaaggtggtcgc

SEQ ID NO: 5255 - DNA, 488 bp, Aspergillus oryzae
cggcacgagggcaggctgcatgtccatcaatcagcgatacgcaaaacaaagtatcgctgtctcctctcagggggacctcatcgcggtagggctggggagaaccatccaaatatacagccttcacaaggatcaaaatcttctgtctcccgcagaatatgtactaggccaggataactcattggccagcaccacacgaggccattacgaggacacggacggcgtcgttgatactctagaatttgccgacgacgacactctccttcgtgtctctatccacaaagaaacaaccattcatcaacccacccgagtgcggtatttgggctgcccggaccttgcacacagccaacccgacctgaactactggcgagcaaacatcaaccggatctacctcgactcagcagctttatcagtggcgcttgcaggacaggacgaataccgactgatcttccgaggcctacgactcctccccccatcattccccgcaaccc

SEQ ID NO: 5256 - DNA, 98 bp, Aspergillus oryzae
atcgggaacggcaacggctcgaacgcatgttgcgcgaattgcgcacggctcgaaacccccgaagtagtgccgagacatcaacagattacggctcacca

SEQ ID NO: 5257 - DNA, 596 bp, Aspergillus oryzae
caagaacttcagatgctcggtctgtggcaaatttttcgctcgacaggcaaccttggaacgccatgaacgaagtcaccggggagagaagccctacaagtgctctgaatgcgggaaggcttttacagacagtagtgaactgaaaacccattcacggacgcacaccggggaaaaacccttcaagtgtacctttcccggatgtaactttcagaccggtgattcatcaaacatgtctagccaccggttgacacatggtgaacggaaacacaaatgcatttacccaggatgcaccaagagctttactcgacctgaccaactcaagcgacacatgaaatcgactcacaaacacgacagttcgaccatgatatcccccgtttcagaacagtttaccctctctttccccatcgtttagagtttggcgttctcaggccctattatacctattttacaacacacagtcgacatggggaatggcgcgaccggagttgggatatatatctagtggtcggagttacactacattcaggactattcgcagaacggaaaaagagatacctaggttggatatatgatgattaacgagctgtctgatgacgatt

SEQ ID NO: 5258 - DNA, 482 bp, Aspergillus oryzae
gcaggaacatacatccgaactctttgtgttcatttgggcctcttgctcggtgttggagcgcatatgcaagagctcaggcgtgtaagaagtggggctatggatgagaacagtggtctggtgactttgcacgatgtgcttgacgctcagtggatgtatgacaaccagcgggatgagtcgtatttgcgtaaagtcatcaaacctcttgagaccctactcacatcttacaagcgtattgtcgttaaggacagtgctgtgaatgccgtttgttacggtgccaaactcatgatccccggtcttctgagattcgaggctggaattgatgtcaacgaagaagttgtgctcatgactaccaagggtgaggccattgccattgccattgctcagatgtcgacagtggagttatctacttgcgaccacggagttgttgccaaggttaagcgttgtatcatggaacgcgatctttatccgcggagatggggtct

SEQ ID NO: 5259 - DNA, 512 bp, Aspergillus oryzae
ctcaaagattaagccatgcatgtctaagtataagcactttatactgtgaaactgcgaatggctcattaaatcagttatcgtttatttgatagtaccttactacatggatacctgtggtaattctagagctaatacatgctaaaaacctcgacttcggaaggggtgtatttattagataaaaaaccaatgcccttcggggctccttggtgattcataataacttaacgaatcgcatggccttgcgccggcgatggttcattcaaatttctgccctatcaactttcgatggtaggatagtggcctaccatggtggcaacgggtaacggggaattagggttcgattccggagagggagcctgagaaacggctaccacatccaaggaaggcagcaggcgcgcaaattacccaatcccgacacggggaggtagtgacaataaatactgatacggggctcttttgggtctcgtaattggaatgagtacaatctaaatcccttaacgaggaacaattgg

SEQ ID NO: 5260 - DNA, 449 bp, Aspergillus oryzae
cccagctgcagctcgactccgcaatcgtgaatatctttgaaaccgttcttcctgccttcatgacgctgggcaacggcatgtcgatcttatcgtagacgacgaaggcagtgctatggggctgaagtcagaactgccacgataagaatagttctctccgactttctaggcctcccaggagagcctccgctgccgtgggatgcctgacagggcacaaggctggcctgttgaggtacccgtttgaagccatttcccccctcctccttcgactacaacgtgtttgattatcgcttgcccgagcttgtggataacacccgcggcactgcagcagagatagcccacctgatctaagtcaacagtgggtcgtagggcatatgttcacgtgggactcgacgcatggatggcgatgtcactaaacgtggcattgtgtagcatcagacccgtattatcaa

SEQ ID NO: 5261 - DNA, 194 bp, Aspergillus oryzae
atctgggcctgccaatggcgggaactcaggccgatcagctttggcggtatagctggtagcggtgctggacagtcatctgggagttcatctgagccgccggttgatagaggcagtccgtcccgaggaagaggccgggaacgcggcttgcagagtgacggtggcgagtatgagatggctgaaatgaagggggttgg

SEQ ID NO: 5262 - DNA, 393 bp, Aspergillus oryzae
gttcgtcgaatctgtgcccaaggtcctcaaggagtccgtgcccaaggaggacgccgagaagatcatcgagacgctcaaggccgtcggtgccaaggccatcatggagtaaacggggaataataatttcgatgaattgatttatacctggtgattgcctcttttcctgactctgcgaaacaggacgacggggatcaggacggccgggacgttgtgattggactgcatcatcgagctggagttttgtctctcaccacttattactgtgtttttagtgtttttcttttctccgtcgtatatctcttgacatgtttctgatataaccggaaagcgggaaaaaggcggcaaatgtacattatcatctcttgatttggacaatttggatccctatggacg

SEQ ID NO: 5263 - DNA, 414 bp, Aspergillus oryzae
ggagacttgcgaatgggagggccattgtgagggtgcctcttgctctagtcacgatgactgcgatggtaacctcgcctgcaagaacgggaagtgcagcgcctaagggaaggatatgcggtctttggggctgggtgttacacgggtgacggattggggataggtaagttgttgtgatggaacttaatatgctatatatagactagaggtggaggtggggatggggaagcatatgcagatagagggttacatataccccgggatgtacagaagctcgcttgagcgaaacccgggttcgccgaccgccggttgccggttgccggtatgtacagttgcatgatatgtatatatagcatgattggagagcctgtccttgtggctgggtatatattaagaaatatgagatgaagttccatc

SEQ ID NO: 5264 - DNA, 566 bp, Aspergillus oryzae
cgaggatggtcccattggcgagcattaaacggatccaaacacttagaattcttggtcgagaaggaccttctgaatccgatatcgcacccggcactggaacgactatacgcgaaacgggtttcacgggcgctagagatgtctaacattgaacagtcaatctcaagtatggtagaggacgtggagaaaagtgacgacagattgctgcttcggatggatgatgctaagaaattagcttcaatccttgaagcaccggagcttgctttggaagccgaacgagctattgtccaggtcgaggagaagttgagaacggatagctcatctccgggcgatgacgaaaagaaaaacaacccaaaagaaaaagagtcctgaatgactcagacatagagtaactaattgtgcatctgtccgtttggttaatttagacagtcaagctatggctgctattatcgggcgatggtggttatgggtatggtcatagaacttggggtgttccgcggtaattgtatgatacatactgaagacattattaacggtatacgggagtaaatataactttccatgaacat

SEQ ID NO: 5265 - DNA, 554 bp, Aspergillus oryzae
  modified_base (380)..(380): n is a, c, g, or t
cggcacgaggcaacaacatcaccacgcttctcacacacaatgccgccattcgtctcctccctcactctccgcacgctgcggacaatcatccagcgtcccgcgttttctgctatcgccgcccctaagccttcatactccatcccccggttccagcccgtcctccgcacacccacggccgtcgcagccgctactactcccagccttgctatccgccagttctcgacctctccgttccgccaggctacctacaaccaagtccgtcgcggatgccgtgttgcccaacgggcgcgtcgtgcccggtcccctgcgctgaaggacagacctgagatgaagggtgtgtgcttgaagactggtatcacgaagccgaagaagcccaactncggtgagcggaagacggcaagagtacgtttgagtagcggcaaggtggttacggcttatattcctggtgaaggccataacgtgcagcagcacagtgttggtctagttcgcggtggacgtgctcaggattgccctggtgtgaagtatcatttggtccgtggtgctatggatttggg

SEQ ID NO: 5266 - DNA, 514 bp, Aspergillus oryzae
aaaaatcaagatgggcgccgcaaagaacaagtacacggtcattctcccaacctacaacgagcggaagaacctccctattatctgctggttattggagcgcaccttccgtgaaaacaacctggactgggaagttgtcatcgtcgacgatggctcccccgacggcaccctggaagtcgccaaacagctccaggagctctggggccccgaacatatcaacctgaagccccgtgaaggcaagctcggccttggaaccgcctacgttcacggtcttcaatacgccacgggcaactttgttatcattatggacgccgacttcagccatcaccccaaattcatcccggagatgatccgcattcagaaagaaacggaagccgacattgtcacgggcacgcggtatgccaatcgcgacaacatcaagggcggtgtgtaccggttgggatctatttcggaagtttacgtcgcggacggccaacctcatcgccgatgtcatgctcatgcccggtgtgagcgattt

SEQ ID NO: 5267 - DNA, 620 bp, Aspergillus oryzae
gcggcgcattctccttaccgttggactccccgttggagaaagaaccgaagaacgtagtcttcgagacattgacattctctggaaaggacgggcagtcattggaaaacacgccgcatcccatcgtcgacagagcccttatgaccttttcgatcgcctcaggaactgactcaccctggaaagtctccttccaactgaggtacaacgtccggttcatcacgtctcacgaatgccgcccaccgggcaacttcatatcatatcactgcgcatgccccactgggagtggcacatcaacgccgtccagcagttcaagcccccgacatcaccaccgtctcccaggccaccctctccacagcgggtacaaatataaacacatatcgctagactccctccccgagcactgtgtccctgacgacgctttccttgagggcagtcaccacaacaaccacagcaaccacagcaaccatcacaagaagcacgaagtgctcatcgtcgacgcgcgtggcggccacgacagggaaaccttcgcccgagcgtggtgcgcttcacttggatatcatgctcttattggcagagttggacggacgtgtctagcgtgctgcatcagagaagccagggctatt

SEQ ID NO: 5268 - DNA, 346 bp, Aspergillus oryzae
cctcgtgccggttcgcgatgccatgagagacatgtggaatgatgcaggggtgcaaaaggctgtcgctagagggcatgaatttgctctacacgataatctgcattacttctttgattcacttgaccggatattcgcgcctggctggcttccagacaatcaggacatgctccaagcgcgtttgcgaaccacaggaattacagagactttatttgaacttggccaaatgaacttccgaatgatggatgttggtggccaacggtctgagcgcacgaagtggatccattgttttgagggtgtgcagtgtcttctcttcatggtagccttatcaggctacgaccagtgctta

SEQ ID NO: 5269 - DNA, 385 bp, Aspergillus oryzae
gcagccagaaagctaaaagattctattgaacaagaaggtagaattctactagcaatttcagctattaaaaaacaagaaattcgcactatagctgaagcagcacgtatctataatattccacgtactacccttcggagacgcctgaatggccatacttttcgagccgaaacgcgcgccaatggccataaattaactcaaaatgaggagaattcgctggtacactggattctatcgctagatcagcgtggagcacctcctcgacctgctcatgtacgagaaatggccaatatcttacttttaaagcgtggttttagtgatactcctactactgttggtgaaaactgggtatatacttttattaaacgccgtgaggagttaaaaactc

SEQ ID NO: 5270 - DNA, 263 bp, Aspergillus oryzae
cctcgtgccgaattcggcacgagggctggctctagcaaacgtatcctccgtgtgaccgtgacgtttgggtcggtttgtctccagcatcacgcggcaaccggttgatgtggtgcgaaaaagttgttcattcgatccgagagcctcaagcgtcagaatctggcggggagaagatttgattccatcaagatcaacttgtcaagtcaacaataccctatcataattcacaacttgactggagccacgtccacagctgagtgacgaac

SEQ ID NO: 5271 - DNA, 493 bp, Aspergillus oryzae
gctggttattgctttccatgagtttggtcatgcgatcaccgcatgctgcaccggaggcaaagttgaatcgatctctcttgatccccatgaaggaggagtcacccatatgcggggtggaattagcgccgtcaccctccccgccggatatctaggatcgtccattatcggtgccctcctgattttcgcggggttcgatattgttgcaagcaaggtcgccagcattgtcctgggtgtctgtttcctgcttacactgtggtgggcccgaagagactggttgaccatcgtcaccattctcttggcggtcggtctgttagtggcgtgttggttcattgcacatggagaggcgctgaagtgggtggtgcttttcatcggtgtcatgtctgctctttacagcgtttgggatatttgcgacgacctcattattcgaaaggttaacacttcagatgccagccgtctttgcccagcgctatggcggttcttcccgctgctgggg

SEQ ID NO: 5272 - DNA, 414 bp, Aspergillus oryzae
gccacttccgcgcggctactgctgcgcaaccaaccccagcggcgattcgactcgcacgcggctcaccaccatgctgagcctgtgaacgagagcttcggtcgtagcttctacgtcaccgtcggctccttcgcctctgcctacgtcctttaccgactgagcaagtccaccgaggagtctggatcgcaatcgtggatttccagcctcatccaaaagtggaccccttcggagaaggtttttgaagagagaaatgccattcgcactgtcgtaatggagaaggctgcccatgaccgccacttgttccagagtcagggccctagagccgttttcgaattgaagcagcccgaggtcagcttcaactccgccccgcctttcaacgtccctgccggctcggctatggatatgagccatgttacc

SEQ ID NO: 5273 - DNA, 515 bp, Aspergillus oryzae
gaaccgaagggctaggcttcgctacgaatattggtgttagatctcgaggattcctctacaattcgccactgatacaggaggttccggatgacctgaagcgccaggcgatccgtattgtctcggctaagatggtccttgctacccgtgcggacgtatctaacttcagccccgatggatcgctgggcgaagatttgaaacagcaatgttttacacggctagagaagctgactgaacctcccccgaattctggagtgaaggccctccccgcttccgatgacaagccggcccgcaagcgaggtggtaggagggctagaaaggccaaggaggcagttgctatgacagatatgcgcaaggcccagaaccggatggccttcggtaaggaagaagcggaagtcggttacggcacgggtgaagggacagttggattgggaatgctcggtcagcagaatgatggacggattcgatcaacccagatcgacaacagaactcgagcgaaactcagcaagtcgaacaaa

SEQ ID NO: 5274 - DNA, 436 bp, Aspergillus oryzae
gtttcgtatcttgattttccgtcttgctcggattatacgccagattgtgtggggatttgacgttcgacatctaaaggagtaccattcactttgaaaccgtctcgatatattcgcttttctccgccctctaccccgcgacgattataatgccgccaattgttgatcgatccatataaaagtgatcaggcaccccatcggcattcgattgcaaggcctgtggttgccaccatgcaacgctctgtgcctgctttatcaaccggctttcaagccctagttacataaataacggcatctcttgaattactccgtcttgccgaccttaaccacgtcagagtctaacttcttccatataatcagattgacgcatgaatggttactcggagcgcgcccggcactactttcgtctggtacagttggcacaataacaacccacggg

SEQ ID NO: 5275 - DNA, 560 bp, Aspergillus oryzae
ggatgctcatgaagtgcagcgcgtcgctctgggattcgagaagcgtttggaccgtcttgaagcaatggccctaggtcctgagaaagaacaggatgccaagcaaattcaagtcgaccttagccagttattaatctcagcagttcaaaaatcgaggttccgtgaacgttttgcacatatcaacaagcaaatcattgattcgcaaaaagcgcagcaaaagcttgaatcgaagaaggcgctcgaggcaattacttcatacttcgaaaaccctgagaacaaagacaagtcgtggcttgttgctaggcttccaatttcagcaaatgcaaaagctgttagcgaatccctgaaccacgtgaagtcgaagctacaggataaaacggtttacgtcttggccgcggactctaaccaaggtcgtgtcgtccacggctgctatatgtcaaaggcaataagcgatcagggagcttccgctagcgattgggcggctattgtttctactgcggttggtggaaaggctggtggcaaagggcccacgtctattggcaatggtactaacccagacaaaa

SEQ ID NO: 5276 - DNA, 576 bp, Aspergillus oryzae
cactaatcttatttccctttttctcaattacacgagcttatttttcaaggcgattaaatttcactaatcaaagtctgcaatgccttccgccacaggcacgaagcgcgtgagaggtgtctctatcttcaggcccttcgtattcggcagcgaagctcaacccttcgacccagccaagaaaccccccaacgcccccgccgatcacacgcatcaatggcgcgtctacgtcaaaggcgtcaacgacgaagacatctcctactggctgaagaaggtccaatttaagctccacgagacatacgcccagaacatccgcaccatcgaacagcccccgttcgaggtaacggagacgggatggggtgaattcgagattcaaatcaaactctacttcgtacctgaatcgatggagaagcctcagactctctggcatagtctcaagttgcatccgtacgggccagatgcggaagccatgaaggagcgacgagaccaagtagtcagccagaattatgaggagatcgtcttcaacgagcctgtggagcaattccatgatctgcttactgggggtggtgcaccggcgcaacc

SEQ ID NO: 5277 - DNA, 489 bp, Aspergillus oryzae
ccgcggtttgacgactagaagacgttacttgacgacactatataatcgtcaatacatacgccttcgatcccatcctccctccaacgagtcacaacctacccgggtcatcagcaaccgctcgatccattgacacatcgcatctcacggaccgtgtagcttgtcaggacagtagctactcgtgcttacggacataccgcccgcttaatttcatctactcgtctctttatctctcttcacattcgctatggatcactccagagatccctgcccctgggttgccctcagcgacttcggtggtgctttctgtatgggtgcaattggtggtgcagtatggcacggtatcaagggtttcagaaacagcccctacggagagcgtcggataggagccctcacagccatcaaggctcgtgcgcccgtcctcggtggtaatttcggtgtgtggggtggtatgttctcgacattcgattgtgcgatcaagggaatccgtaa

SEQ ID NO: 5278 - DNA, 337 bp, Aspergillus oryzae
cctcgtgacggtgcaaagattggttgccgatacgcaacggaagcagaagagggtaatgatcgatcagccgcttgcccctttacggcttagggttacacgagcatctcgcaggctcagcagtgagtgacatcctcttcgaggtgagaagcaagggagtatcatccggccgaacgccgttaggttgtttcgagtttatttggacgggcccgaatagggaaggggcgtggaatgaattaggaagttacaatttgcagttctggattatcgacattgtctcgtgttgcttttcttctcctcgaaactctagcatagtagcatcatcattaggtagctgctc

SEQ ID NO: 5279 - DNA, 440 bp, Aspergillus oryzae
cggcacgaggttcgacaaccccgaccacttcgacaacaaattcctccaccgacctcccggagtctgtcgaccgaagccttcgccatggccgatatcgatatcaagatcgctcaatggaagctcgttgagattggccgtgtggtgctgatccgccgcggcccctacaccggcaagctggccaccatcgtggagattgtcgaccacagacgtgttctggttgacggtccttccactgaggagaacaagatcgtcccccgtcacgttcttcctctcgcccacgccaccctcacccacttcgtcattccccagcttccccgtgctgccggtaccggccccgtcaagaagctctggcagaagagcgagatcgacagcaagtgggctcagtccagcttcgcccagaagaccgagcgtgctgagcgtcggaagaacctcaacgactt

SEQ ID NO: 5280 - DNA, 532 bp, Aspergillus oryzae
ggatgatctcaccaagcagctggaggagctgaagcaggagctcagccagctccgcgtccagaagatcactggcggtgcctcgtcgaagacccagagaatgtgcgtttgaaaattgctttttctttttcgaaatccctatttgcacctggttacgccaatacccaaaagaatatgtgcgctagatagaagtggagggaaaggagggaaagattttacatctactgcgaaaagaggagggactgcaacgacagcgcaaaattctttttggacaaccacaacgggaaaacggaagcagaccagaaaatgctgattgtgaatttgttacagccacgacgtccgcaagtcgattgctcgtgtccacaccgtcatcaacgccaaccagcgcgctcagctccgcttgttctacaagaacaagaagtacctccctctcgaccttcgccccaagcttacccgtgatctccgtcgccgccttaccaagcacgaggcctccctcaagaccgagagacagaagaagcgcgagatccacttcccc

SEQ ID NO: 5281 - DNA, 503 bp, Aspergillus oryzae
gcctgaaagagataatttacaatggccgcccaaagacagaacgtttccagcgacctggtctggcagctcacccgcaaccagaatgcttttctggtcaagcgtaacagcggcggcggctctcagttctcccgtgaccctttgaacctgcagaacaagcactctttcaagtacgctggatacgccaacaccaaggctattggtgtgcagcccactgagaacggtggcgttgttgttcttaccaagaagtccggcaatgcccagcagcccggaaagaacgccgttcgcgtgacttttggccccaaggccttcacccgcaaggtgttgcagacaagaccgcaaagaacggctaccgtgctgacctccgtgaggacgctgttgcacgtgtgagcgccattcgccgttctcagaagcctaagaaggatactcctccccagaagcctagaggtgctcaggcccggaaggccgctgagcaggagtcggcataaaggataggactcgatgac

SEQ ID NO: 5282 - DNA, 647 bp, Aspergillus oryzae
caccggccggtcaactgccccggagtgttgatgtgatcttagatgacgatctcgtggaccgagctaagcctggcgacagaattcagttggtaggaatttaccggtctctgggaaatcgaaacgcaaactcgggctcgtcgacattccgcacgcttgttttggcaaacaacattatccagttatcatcgaaatccggtggaggaattgcgcaagccaccattaccgacactgatattcgcaacatcaacaaagtctccaagaagaagaacgtctttgagctgatgtctcactctctcgcgccgagtatctacggtcacgactatatcaagaaggcaatcttgctcatgctgcttggtggtatggagaaaaacctcgataatggaacacacttgcgtggtgacatcaacatcatgatggttggtgatccttcgacagccaaatctcagctcctccgtttcgtcttgaatactgcacccttggcaattgcaacaaccggacgaggctcatcgggtgtcggtcttacagccgctgttacgtctgataaggagactggagagcgcagactggaggctggtgcaatggttctgggagaccgcggcgtggtctgtattgatgagttcgataagatgagtgatgtggatcgcgtt

SEQ ID NO: 5283 - DNA, 467 bp, Aspergillus oryzae
aaccctttccgcagcccaatcaaatacccataagtcaccaagtaccgtcgacagatggagtgaaacgttcccagaatcaattttgactgcacccggtccccgaccaactttgccagacgctcccgcatctcccggctcgctttgattgtgaacgtgcagcaaatgacatcttgcggtcgatagccatggtgggcgaggaggtacgcgacgcgcgccgttaaggtcttggtctttcctgagccgggcggggcgaggacctggagaatcggggatggcgacgatacagcggctctctgcgcggaattcaacccatcgagtatcgaatccatgtgttttgtggatggtttgggcgggatggggtagtttagacttcgtgggaggtcgggatgtgacgcgctcttatcgcgtggtcatgtgattggatgtatgttatgaagtatggatgctgttgttccgcgggggggggg

SEQ ID NO: 5284 - DNA, 613 bp, Aspergillus oryzae
ggcgctggaatactgcattcgtaaatcggatgacaaaattacccatgaagactttattccatctactgatcctatttgcagaatgttgatcggttgcccaattaatccttctctccgccatatacttttgtttggccctcagctaagccagcgtgatgtacagccacaggtaggaaattcgtctcggggagaaagagaaatctgcgtgggagcaagcacgaactatacgatgcaggaactttagtcagcctgtatgaaaattgcatcccacaggacgatgaccggctggatggactcaccgaaaacaatcatagcaacggcaaatcagccgagcggggaggatccaaggctctggggcgacaagatacctgcaagatgcaaatgaaaatggggctagcctggacaaaggttatccttgactaagtgagctttgcatgaaagctcccaatcctcctcacaagattagcgatctctttcatcgccccccccagcagcctcagaaggatgacagggttcatcactgatcattggacgggtatacccacctgattattttcttcaaccaaaacccgggatgcccatggagaccaatcccaattgccgagacaaagac

SEQ ID NO: 5285 - DNA, 600 bp, Aspergillus oryzae
acgcgtcctgtcgcgtcgagtaggctgtgtgcaagaccagtagcagttgcttgattactcttggggctggctagggagacactttacttgcctacctgattgaaaatgacggcggatatggatactcagaatgaatacgatgatagtggacttcccgggcctggagcgcccacgccactttcagctttagaaggtgttgcgggattaacgggaagagatatcaaattgtttgtcgatgccggctatcacactgtcgaatcaattgcgtatacaccgaaacgtttactggaacaaatcaaaggtatatcggagcagaaggccaccaaggttttggttgaagctgccaagcttgtgccaatgggtttcacgactgcaacagaaatgcatgcacgtcgaagtgagctcatatcgatcacgacaggatccaagcaactagatactctcctaggcggtggtatagaaacgggatctattaccgagatattcggagaattcaggacaggtaaaagtcaaatttgccatacgcttgcagtgacttgccagctgccattcgacatgggtggtggggaagggaagtgtctttatattgatactgaaggg

SEQ ID NO: 5286 - DNA, 525 bp, Aspergillus oryzae
cattttcatttttgggtactcactcttatacctcacttctctctatttaattcatttctctcactggttcttcctttttttctgtattgcctgctagaaacgatattattcgttcaaagaccggaagaggaaaagagcacagctcttgtgtgagtgcagtcctgctactagccctacataattgtgattcttccacattgagcatgatggaagcttccaattctcccgaccaacaatcagtgctcagtgaatctatccttgttagcgagtcgcttgttccagcaagggatctcaaaggagttggccatgctgaaatttcatttgacggcctactgaaagaccccctaataatcaaggaagatctgaaggaagggtgcggaggccagctatggccggcaggcatggtcctagcaagatatttgttacttcagcaccgatctgactttaacaataagacaattgtcgagttgggagctggcggaggtcttgtggggcttgctgttgcgcgccggttgcgacatcggg

SEQ ID NO: 5287 - DNA, 286 bp, Aspergillus oryzae
caccaacgccccttatcccacctgcaacaaatgcgtccaggcctccatggatgtcttcggcgaatgggcgcagaaaagcggtcagccgcttgctcactcgtatctgccttctgcgaggtctattaattcgaagtgtggggttagctttgcgaatgctaatatcactgttgcgggtgatggggagtcgtcggcggcgacgtggtcggggcgtcggccggatgggtttttaatggtgtgggttgttgctttgagtgttggggtgagtctttgggggtgggtttagttg

SEQ ID NO: 5288 - DNA, 355 bp, Aspergillus oryzae
agacggcacggtgatttatgacgccgttgtcacgcatatcgaggagaacctcccggatctcgcagagcagatttgcgttgtgcgactgggtccttcagatcagctgctgaatgcccttctctcaaaggctaaggtggctctacaattgtccacacaggaaggattcgaagttaaagtgtcggaagccattcacaaaggaacaccagtcatcgcaaccagggctggtggcatccctcttcaagtggcggacaagcagaacggcttcctcgtggaggtaggggataccgacgcagtggcccagcatttgttggacctctgtacggacgatgagctgtatgagcgcatgcacaagttt

SEQ ID NO: 5289 - DNA, 156 bp, Aspergillus oryzae
acccacctcaacaatgaagtcattggctcctcgaagatcgaagaacgtctcagcagacgcgccgaactagccagcgagggctcgaataatgatgtccaggtctttggagattctcaagacggatcaaatgcggcctctaccaccgaacttcaggaa

SEQ ID NO: 5290 - DNA, 632 bp, Aspergillus oryzae
cgtccaccttcgacctgtcaggccgcaaccaccatgttccctcaacgcaaccttcttcgtctggctcagcgctctgcgcagcagcagcgttctgctccggttcgctctgccattcagcgccggttcaacagcaccgactccaagcttccctggatggtcgacaacgaattcaaccgtgagagagcggctgtcaagcaccacgctgcctccaccagtgatctctggcgcaagctctctatctacgccgttattccttgccttatccttggctccctcaatgcttacaacctctgggaagagcactgggagcactgggagcacatgcctcctcttgaggagcgtgtggaatacccataccaaaacatccgggtgaagaacttcccctggggagatggtgacaagaccatcttctggaacgacagcgtcaactaccacaacaaggataaggctacctaaacctttccacggacgatgttacagccttcaaccggcggtgctcggaacttgcggcgaagaaagaagtgtatatttactgcagtgagcagaagattgaacggggagcgttgggatctgttgataaatgaagagttttaccaaagtgcaggtgttgacttagtcgttcttgtcagaaa

SEQ ID NO: 5291 - DNA, 337 bp, Aspergillus oryzae
cggtatccttgcccttcggagagctaagcggagaaacatggaacgtctccagttgatttgcggtggtatcgcgcagaacagtgtagaggacttaacacccgacgttctcgggtgggcaggtcttgtttacgaacaccagctcggagaagagaagtacactttcgtcgaagaagttaaggaccccaagatccgtcaccatcctcatcaagggacccaaccagcataccatcgctcaggttaaggatgccgtccgtgatggcctgcggtctgtgtataactccatcgtcgatggttgcgtcatccccggtgctggtgcgttccaagttgcctgtgccgc

SEQ ID NO: 5292 - DNA, 439 bp, Aspergillus oryzae
gtccctgcacgcgtgccaatccttcacccatccgctcaagctattcgcgcggtgcttctgcttcgtcacaaaagggtcactcaatactgcagtcaacatggtgtctcctcaaattaccaacctggccatcatcgtggtgtcgatgcagctggccaagaagatcccttttgaggaccctgacgttcttcttgttgtccgtggcatgtatatcttgtccaacgtgctcatcctgggtatctatctctacactcagtccaagatcaagagcaagaaggatatggctacgttgaagtacgtggagcccgctcctctcggtagcaacgaggagccccgtccggtaactaccaccaacatggagtacgaccaggggcagttgcgccagctgttcaagggacaactgatgggtgttggtatgatgtgcgtgatgcacctgtacttt

SEQ ID NO: 5293 - DNA, 553 bp, Aspergillus oryzae
cggcacgaggcggcacgaggtcaagattcgtatacagaaagcacaagctgtggtggagagcctgcctgatgtgcaccgctcagttgtggaacaggagaaggagatcaaagaacttgagcacagaatctctagactgaaatcggtcatctcagattttgggagaagagccgaccctgcgaaaacagagaaaacggagatgggagcagcttgactggaggctccaccacgatacgaatgtctgttccacggcgggtattcctatcgtaacggtaacagatttgaacacacagattgcctttaatttgcgatcagtgagagggaacattggattcatcatggaagcacaacttggattacaacttgcgagtcctgacgatggctcccagtaccattctggattgtagacaaacacatcggtttgctaagatctggctaagcaagggatagtaaagcgtgctagataccttgggggcaattgatggacgctatctgccatgaaccctaatggcgctgctacatggaagaccttgttacagctgcctggccccgataa

SEQ ID NO: 5294 - DNA, 523 bp, Aspergillus oryzae
catttcgcttcgttgcctctccgccgttgtttgttcctccactcccgcgctcaatcaactcccgtctcccgtcatcatggtcgtctactaccagctcgccggcaagcaggtcggctcccacgtgctcgccatgggtgttctcggctcccttttcggtggtgtctacctcgcaacccgcggtggctctcagcccaagcaggccgctcccccgatccaggcctcttccaaggacgaggagaccttcatccaagacttcctgaagcaagtgaacggaagcggggaggagaagaagagcagccattaatgtctcggaaagatgagaaatgaatcgaggatcgccccgacgcccacagaaccttgacggcgactctccctaactccatgggtgtcaattgtatgatccgaaatagggatggcaactggggcgggccttgcattgtatgtcggactgctggacagcttgtgccagcggcgaggtgtgtgatctgtacatatagaggtatacaccgcattgagctatgtt

SEQ ID NO: 5295 - DNA, 603 bp, Aspergillus oryzae
aaaacaacaaatccacccaacaaaaacacaaataagaaacaaaatgatcgaccgcaccatcttcgaaagcctccagtctaagatcgacgaagaggctgccgtccgcgatgaactccatgagatagttcagacgcttgctagaaatggacgctccacaacggctattctctctcgagctcattccacaccctcagatcagttgaaacctgtcctcgacgaggcaacaaaggagatcctcgctcagaaagagcaagtcactcggctcaaggccttggctgacaagcacccgttctacaaatataacggcgtgtggactcgtgaactgcagaatctggtgtcgtctattgagctctgtgcctatctgggcgggctggaggagtacaagagtaacagtgctgcatcgttcttgactattgaggaggtcgggaagtttcttgatatccccgtcaatcttaaggaacaagatgcgttccatcttacgattgaagaatatctgctcgctctgatttctatggtcgaggaactgtctcgtcttgctgtcaactcggtcactcttggtgattacgcacggccggtccagattggcagtttcatcaaggattt

SEQ ID NO: 5296 - DNA, 635 bp, Aspergillus oryzae
ccagagacgcggatcataccacaaccggtctttgccacagccccggattcgagctcccagaactctggtgacgacgtaaccggtggggctacattcggcactcagccgatcacggatcaaggcgatgagtgtgctattgatgatgaagatgccgaccagtacgccttaggcatatcgcgagcaagctcgatgacttctctccattcacgtgcaatgacctccgaagaaggccatgtccatcgtcttggccaaaaccttcgccgcgactttcttaatccctcattcaatcaaggcgatggtgattcatctctcaccctagatgatgcacacattgcagcccttcgcgagaaactcgaacgtttgcagggggagcaggaacactctcattttgacggcgtgggtgcagacaaaacgttcgagcagttaggcacgactgtagaagaactgtgggcagctcataagcaagatgcagaaacctttgagaaattcaaacagagccagattgcggctcaaattaatagcggaatgagaacctcatcatcagggaacggcgctggcagccagaacagacaggactgagtcaaatgacagtcctcattctaaatgtgggtataacctgctgcagcgactatttt

SEQ ID NO: 5297 - DNA, 533 bp, Aspergillus oryzae
catctacaaagactcctttctttctagttgtcccgcttttacgtcacattcgatatgtcacgacgatacgattccaggactaccatcttctcccccgaaggtcgcctttaccaggttgaatatgcgctcgaagcaatttcgcacgccggcacggctctaggaattttggttaaggatggaatcgttcttgcagcagagaagaaagtgactagcaagctgctagagcaggacacttctgcggagaaactttatactctgaacgataacatgatctgtgccgtggcaggtatgacggcagatgcaaacatcctaatcaactacgcccgacaagccgcccagcgttatcttcttacctacgacgaagaaatcccatgtgagcaactcgtccgtcgactgtgtgatctgaaacagggatacacccagcatggtggtctccgtccattcggtgtctcgttcatctatgccggctacgaccctctgcgggagttccagttgtaccagagcaaccccagtggcaactaccgtggttggaa

SEQ ID NO: 5298 - DNA, 399 bp, Aspergillus oryzae
gatccacaagacccgtcccatcttcagcactcagttccaccccgaggccaagggcggcccgctcgactcctcctacctgttcgacatctaccttgacagcgtgcgcaagtacaaggctagccagtcggctttccaccccactcgggatagcctgcctagccctctcttggtcgatcttcttgctaaggagcgtgttggcgtgcagcccactattggcatgcagaatgtggccgctgccgctgctgccgcctaaaagaatgtcttcatgggtttggtcttttgtgcgtggagtctgggttaatgggttatgtggatgtcattcaattcgggttaatatttagtctggttcatatgggtcttttttagcaattgaaaaaacttgctgttcaaacaatcagt

SEQ ID NO: 5299 - DNA, 308 bp, Aspergillus oryzae
gatgagtgctgggaaaagggcgatgggctcgcggaggttattggctatgctattgagaagcagttggagataacctacgaagaagagcctgaagagcctgaagagtcgaaatcacctgtttagccaagctttcgttatgagggtttgacctccgatgaacccctacaatgatgcagaccatcaaaatgaagtgcatgttacgggaaggttaattgcattggcaattcatattacatttgccataaggtgaattatgggttatgaaactagtaaacatcagaagaaaagaaattagaccagccattttc

SEQ ID NO: 5300 - DNA, 496 bp, Aspergillus oryzae
cccgtcgtatgatcttgtttccttgtacgggcttggtccggttgcgaaatcggttgcaaggatggatccggtaactggggagaagatcaacagactacgaaagtcctacgaaggcaaactgaaaggccttggcttagctgggagaaacaaacctgtgaagcatgaacccggtatggctggtggattgaggcaaatgacgatgtggccggaagaagagtggcaaaaccagaaggtgttcgggaaagagatcaaggttgctgatatggattcagcgttgcataaccttcagatgagagccatgaaaatggagccgggcacagttacgaacaatgattactgggaagacatccttggtcacgaaaaacagtcgaaacatgccggaagtggggatggtagcaaaaaggctgcgacaccttccaatggcgtacgagtgcccagtcaagcaaatgggacacccaacgcagctgagcccggagcggtctcggcccagtcgggg

SEQ ID NO: 5301 - DNA, 195 bp, Aspergillus oryzae
gatttgcttcatgctggggattcggtgtttcgggggacgaagcttactatgcggacggatattttgtatcacgagttgtgaagatgactatcttatatcgaatagaggtatcaagggctattgagggtttagtgggcatgggtagaagaactgtcgttatggatggcaagacaaatgatcttcagtttgatatac

SEQ ID NO: 5302 - DNA, 536 bp, Aspergillus oryzae
gcccccaaccgaaggggacaaaccagctggcggtcaggttgacccaaaagatccgccagccaccacaccaagtcaacccgactcgaacaagcctctgcccaaaaataaacccgaagacgaggcaaaggcttccaacttgaaagagtattaccaacctgttacattccgcattcatagccccaacgctaaagtcctcgagcctttatctcgagtggtgaagcctcccgatgaggtgcgcaaatacatgaatgagattatggaccgggcagagcgtgctcctgatgggttccttgcatttcaactaccacgtgaagaagcaggcgacgaacatgatgtagatgagaaaaagaaaagtggaacgccagtccctgcgaaccgcagccggctctctaggggaagagcggttgatgatgaatcagatatcgaaaacagagaggagcccgcggaggaagaagaggaagaggaactgaaggattattatggaccaccaactggacttgtaccgatgggtctataaaacgattaaggctcgcgta

SEQ ID NO: 5303 - DNA, 475 bp, Aspergillus oryzae
accgtccttccctctcccctcctccagctgcccaccaccacacaccccagcagtccctaatatctgctgaatcgctacacctccgcattctacatcgcctcggatcatcaatccctcacaatggccgccatcgcccccatcaccggcatgctccgccggaacctcgtcctggacctgagcaccgctttcggtttcggtactaccttcggctacctctggtggtacggctaccacctcccccgcgtccgcgcccgtgacaactactacgtccgtctggagcaggagcgcgctgctgcccaggagtaaatcttcgaatcatgacccatgcatgaacctcgctcgactggatttgtcaaggataacccgatgatgcttgtttcgtttcggtccgctttcgctatagatgtctagaaggaatgggactggtgttgttggttcattagttgggttggggacatgttatgggagtgagtca

SEQ ID NO: 5304 - DNA, 590 bp, Aspergillus oryzae
gaatactataacaagtcgctcactgaacaccgaacccccgatgcccttacaaaactccgcaacgcagagaagaccaaggctaagactgagaaggaagcctacatcgacccagcagaggctgagaaggctcgtgagctcggccaaaagaagttccaggaggctgactggcctggcgctgttgatgccttcaccgagatgacgaagcgtgctccccaggatccccgaggtttctccaaccgcgccgcagctctcatcaagctcatggccttccctcaggctgttcaggactgcgacgaagcaatcagccgtgatcccaagttcatccgtgcttatatgcgtaaggcacaggctctgatggctatgaaggaatacaacaaggctttggatgcttgcactgaggctcaggaaaatgatgatggaacccatgcccgtgagatcgatcagcaacagcagaagtgcttggaggcgcaattcagctctcgtgcgggcgagactgaacaacagaccatggagagaatccagaacgacccagacatcatggctatccttcaggacccagtcatgcagagcattcttgcagcaggccaaga

SEQ ID NO: 5305 - DNA, 449 bp, Aspergillus oryzae
tgcgggtattgcagtctatgaatcaccccagtttcgacaatgggtcaacacctcgcggcgaaagattgccgtcgcattgcataatctcggcgatgagatccaccctcgaacctccgcctcacctacgaggcaagacacatctatgactgaagagctgggcccagaagccgaagagcgtatgcggatagcaagggaagagcttcaacgacgacgttccgtgcttgaagaacaccggaaaagaagggaaagtgcccccgcaggatcgttcgatgcgcttgttgatgacgatggccgtttgcttcggaccttgagtccagaaccgtctggagggctgggtaactcttccgcggtggaagtgacaccatcacaggctattcaacgcggtaaaaatactggttctcagacccctgtggccgagacgcagaccactggcgctgctcttacgaagc

SEQ ID NO: 5306 - DNA, 572 bp, Aspergillus oryzae
gaccatacgctttcagccggtgtgtccggtggaacagttgtgtcggagcaatatcagctaaaggtaaggagttggggatttcgggttccgaagactgcggcagaccgagagaaaaaaaaatcattgggtcgataccacgcaaagaaaatcatccatgcaaatccaaggatgaaaaaacctaaaattggggacgtggagaccaatccgcgtctgagtctatgagaagccgacaatcaaacccacggtggaggatacccatgcggtcatcaggtttggcgtcaaatcaccgattatcatcttccatcgctactgcgataggcaaatgatacgcctaccttaacatatgctaacttcgctaaagcagacgcggttactcgtggaaattgctttgtcgtcttttgatgaataatttcatttcttgatcaatgcacgaacatgattggtgccatttaacatctcaccttacaggctaacgctaggccttgtcgggaaaccaataaatgggaacggcttcccgaacaacgtccgagtgatagcgttcgagccgtcttctcggcacgatgtgtggcgta

SEQ ID NO: 5307 - DNA, 365 bp, Aspergillus oryzae
cgtgaggccttcacctccgtcgaggagatcgtcaccggcggcaagttgaatgagcttgtttacctgaaggcctgcattgatgaagcactgcgcttggcacctgccgttccgggggccattccgcgcgaagtgatggagggcggcgccgtcgctggatggggcctttttacccgccggcacggactgtgggaccccgacttactccatccaccgccagccccagtactaccgcgaacctgaggcgtatttgcccgagagatggattgaaggggcaacgtgcgtaaccgccgatgataagtgggagagcaccaaggatgctgttgagactgcacggagagcattctgtccgttcagcatcgggcccc

SEQ ID NO: 5308 - DNA, 329 bp, Aspergillus oryzae
ttgaggacaaacataagctcacagagaccgagcagaagaccaaagaatacgatgaaatcgcgttccgctatctctatattgttgccgtgcctctcctggctgcatacgcagtgtacagcttagtctacaacacccacaagtcgtggtattcctatatcattgaaacacttgttggtagtgtctatgcctacggtttcctgatgatggtccccagcttgtatatcaattaccgcttgaagtctgttgcgcatatgcctggcaaagccttgatgtacaaattcttaaacaccttcatcgatgatcttttcgctttcacagtcaagatgccg

SEQ ID NO: 5309 - DNA, 265 bp, Aspergillus oryzae
cttcataagcgaagatctgacacaacttacgcaaaactcaataaactccaggcaaaaaagaaagaaaggaaaaaggaagggaggagcaggaaacaaaaaatgacatcctctacttccacaacgacaaccaaaactacaaccccaccagccaaaaagagcaagaatctcccagcagaatcagccctggacctcagtgccaacttcgcgaacaaccgcaaaggagcagcgggctatgaccatgaggtttacctccaattaacggcgg

SEQ ID NO: 5310 - DNA, 341 bp, Aspergillus oryzae
cacagccaagtggcaaccggccgtaggaacgaaatggcagatcgagcttctgtacgcgctcaacgacacttcagtagacgcagatatctacgacattgatctcttcaacaatgacaagtcgaccatcaccgatctacaaaagcaaggacgcaaggtgatctgctacttctccgctgggagctacgagaactggaggcccgacaaggacaagttcaaggactccgatatgggtaacacgctggatgggtggccgaatgagaaatggcttgacctcaactccaagaacgtgcggagcattatgacgtcgcgtctggatatggcggtcgagaagaactgcgatg

SEQ ID NO: 5311 - DNA, 389 bp, Aspergillus oryzae
cggcacgaggacggttactactccccaccaggggcgttaaatatggagtaagcagcattatgacattgtatcttaccagccgttctgtgcttcgccggaacttgggagactcccgtctcggggagaatactggattgatgaagatggtggccttgaggacgtctgctggacgtaaagccagtgctaggcaattctcaaaatcatggaaacaataccaaaaccaaaacaaccaagagaacccagcgccgaagggcttcggatcccgactacgatttgcgctccgaaacaccaaggtggaatggtatccgatcccgataggactcggcattggtctcctgggtatactccatttttacaagtcgcaaagagccgaacgggaacgccgagaa

SEQ ID NO: 5312 - DNA, 544 bp, Aspergillus oryzae
cagcggtatgcatgcgtctatttcgacccacctttgctgggactatttcaaccagaccaccggccaatggaacccgaacttgcaatgcttcaaggaaagattgcatgaccacccggagcgcatctcgaacttgtacttcaactatgccttggtgtcccgcgctgtcgcgaaattacggaagcacctggagagctacacatattgcaccagcgatcccgcccaggatgcagacactaaggagaaggtgtctctcttgacttcggctctcgcaaaccggccacaaattttcgatgagaacttgatgttccaggatccaagtgccatcggcctgaaggaagacttttcgcaaccggttcagaaacgtgagccgcttgatggactgtgttgggtgcgataagtgccgattatggggaaaactgcaggtcaacggatacggcacccgccttgaaggcctggtttgagtacgatgagaccaagaatggagaaaaccctcctttgcgcaggacagaacttgtggctttgatcaacactctaggtcgcatct

SEQ ID NO: 5313 - DNA, 329 bp, Aspergillus oryzae
aatctcaactactcaaacacacgataacttcagccaagttcaggaaagctctgctacacaatcacttttttattctaatcacacacactgacaggccttcgaatatactgcaatacagcacctcgtgaattcgacctaatgacgaagcaagaaagtccggaccaggagaacacagtcaccatcctcctactaggagacccaggatgcggtaaaacgacattcttatcagcattgaaacaagggcgcagtaggcttaatggaaatgactcgcatagtcaagctgagcctttacgggacagtgaccagcccttcctttatgatatccgttt

SEQ ID NO: 5314 - DNA, 334 bp, Aspergillus oryzae
gggtctgggggcccgaccgctacggctccattcctgcgggacttcagcctcgtagcggaggcggccaaacgcgcccagatgtcagttgtgatgcgtgatttggaggcggtaacgttatagatccgatgcagtgcgctactgcaggaggtgtgggttttatacggggtcttgtgtgacgtgggcagttcaaatagccgaagtgcgtctattggggattcgtggtcgggttttggttaggcgatggtgatggtgatggtatagagggcagcgtctcgtctcgtctcgtctcatgtcatctctctaggatggatccctgtctcttggtctagatcgg

SEQ ID NO: 5315 - DNA, 245 bp, Aspergillus oryzae
tagccaagatgcctcaagctcagcccgagttgaagaagtacatggaaaagcgggtattttgccaactgaacggcaaccgcaaagtcattggtatcctgagaggttacgatgtattcatgaacatcgtgctcgacgaagctttcgaagagaagcagggcggagagaaggtcgcaattggcatggtggtcattcgcggtaactcggtcgtcatgctcgaggctctggaacgtataagcgacaaataa

SEQ ID NO: 5316 - DNA, 417 bp, Aspergillus oryzae
aagccgccaaatcgaatttaactaagccctttactctgactcgcctcttcaatatcaccagccggcgtatttgctctatagatcataatatttgacctttcaccatgaaccactatcctgaagtctggggtcggcctagggatgatatttacgggccttacaactcctcatatcttcagaccactggcccaaaaacccacacccagtctcctgctgtgactgggacgtcggtaatagcggtcaagttcaacggtggtgtggcaatcgctgctgataacttggcatcgtacggatctctcgctcggttcaccgatgtcaaacgcctgcgcgtattcggcgactctgctgtggctggcttcagcggcgatgtgtcagacatgcaatacatcgatcgccttctggaatctcttgacatcc

SEQ ID NO: 5317 - DNA, 203 bp, Aspergillus oryzae
catcggacgtcctggcctagcgtgcgccagctgtgcaacaacgtgctcgtgccttgcagtatttatggatctgttctcttgactcccaccaaccctatgcatatattacggctggcttaggtctcagattgtgaggatggatgtcttgtgatatagccctcggaagatattagatggtacagatggaatgaatctacgttgct

SEQ ID NO: 5318 - DNA, 334 bp, Aspergillus oryzae
cggcacgaggccggtcttgtcagtgtccaacccgcgcgcttggccgatctgcagccgaagtatgcgcagaagctcgagcacgatgctgagaacccggaggctcatgggtggtatgcaggcctcattcacagtcttggagaatgcattggattcctcggtgctatcccctgctgcgtttgctgccctgaacccctataagcctgtagcccaaggtgaagttggtctcgtgtctgaagtttggacggcttcgaacgtgcagtctgaccctggccttgttaaagtgaaccccctgagtgagcacttaaccgcagtcgatgtgaagatccagatcgtc

SEQ ID NO: 5319 - DNA, 339 bp, Aspergillus oryzae
ccacaatgcagatcaagtcatccaccgttctcgtcacccttgtgggctcctccatggcccaggctgccaacctccagcaaagacagtttgaatcgaccgacgtggccgccactaccaccgacagcaactcgggttctacggagaccggctcagtcactctcccatacctcaccgagaccagccagacgggcagtacgactggatctgaagctcctacaggtaccggctctggaactgccactggatcaggatctaccactggatcaggatctcccaccggatcgtccagtagcggagccgaatcgacctcggactccgctactcccactagctggatgg

SEQ ID NO: 5320 - DNA, 476 bp, Aspergillus oryzae
caggatggagtgatgatttgccagtgcttttccctttctcgctcatataatcgctcggaggtccagaccggtgtgcaataaccagagactgacatcggtgtggcattgcgaagagacattacccaacaatgactacatgacactcgtggatatgacggggtgtacggatattattatcaatctttgactgccgacgttgtttggagagtcttgtgtctcatactgagcccaaccagcatgtttggttaccgtctgctcgcgcagaagtgcacaaatgcaagccactgtgtaatcaacgcaggcgaattgcttgagcggtctgggccatgttgtgggagcgtcaggcatgaacgaccgcctattcgttcagcattggataactgatcaggtggctatgggtactgtgcatcgcagagaatttggaatagaggggagacaatgtgtaggagtgcgtcattgtcaacctcgctcagctg

SEQ ID NO: 5321 - DNA, 11 bp, Aspergillus oryzae
ctggaagaatt

SEQ ID NO: 5322 - DNA, 387 bp, Aspergillus oryzae
gccgtaccgagaaggccgtcacctacgaggacattaagaagaccatcaaggctgcttccgaggagggcgagctcaagggcattcttggatacactgaggacgacattgtctccactgacctgatcggagatgcccactcctccatcttcgatgccaaggccggtatcgccctcaacgagcacttcatcaagctcgtctcttggtacgacaacgagtggggctactcccgccgtgttgttgacctcattgcctacatctccaaggtcgatggccagtaggaatcaggacagagaccagaaactagaaagtgttctataaacaaaacactcttagtccccctgactgtgtcccaagttccccggattatcaggtcaccaccccttgaaa

SEQ ID NO: 5323 - DNA, 476 bp, Aspergillus oryzae
gtaagtgcaaaacatggaactgtccgcatagctactcgaatgaacctagcagatgttgcaccgcggattgtggtttcctacgaacacaatgcgcgcagttctaacagttttttggtgacgatcaatcgatagatttatacgccggacagattaggtcattcaagagcatttagagtgtacgttgatcggaaagaaggagatgcctgtctcatcaccgttaaaggctgctgcaaaaactgcagcagcgaaagtgagatcaaaggtctcccgtagctcgcacgagaagtatgcgtggctttatgctcccccagcgaccaaagatgatattaatccagtcgtggaatgctggctgaaggatcaaggcaacctcgactatgtttctggagttacgggcggaacgttccgggataacccgctggaaaacgtcgttgaatcctttgcgatcgtttggacaaaaaacagtggcactatcgaaa

SEQ ID NO: 5324 - DNA, 409 bp, Aspergillus oryzae
gctaaactagcccagcgcaagcgtgaagtcgaggcacaactagaccgagtacgagaagacatcagatccctccatctaccgtcccgcgaagaagggttcaagagagacaaagcatctgcagctgctttggcagccgccgacgccagcaatgatcaattgagcaccagtgcaggcagcagcaaccagcggaaaacacccgaaagccgttcgtcgagcagtaataacctagcccatcctgcaaacagccgcgacccggcaaagatgcacaaggtcgcttctggcttattcagcgaggaatccaagctcctcaagcagcttgggaagatcgagaagcatcagctcaaggaggcgtcaaagattgagtctaaacagcgaaagcaagcagaacaggaagaaaagacgaagtctt

SEQ ID NO: 5325 - DNA, 570 bp, Aspergillus oryzae
gttttctacaaacacaatctcaccctttgaataccttcggtcctgaagatgtctcgctcgatgctatcatctgctgctcgccagttatggcggcagcgctcccctcgcacaggagtttctgccttcccatcctcaaaaccccgttcgagcatctccccatcgttcagcgattctaccccccgccgctcgatatcatatgccatctgcgagtcgaagacaaaccgactcacttccccacggagatccctccccgcaattgtgcgtcttcaacagcgttgcgccttttcgtccacctctaccagacccgccaccaaggttatacagaacccgagaaccggcgaagatggcaatccactgacgattgaaatctcgccccgcgctgcagaacgtctccgcgaagtcaccgatcctacatcatctccatctgtccttaaagagaacccataccaccatctccgtatcacagttaccagcggaggatgccacgggttccaatatatgatgtccctggaagccgcatcgaagatcgacccggaagaagacaccgtcttcgaggcagaatactccccc

SEQ ID NO: 5326 - DNA, 498 bp, Aspergillus oryzae
aaaaacgaataagccggcatttagcaaatggagacttgggaggagggcagaaggtggcttcatgtatcgtgcagcgagacggcggcattcaggtgacgacagaccagtcccgatggagcagcactgtgacgtgtgacgttgaccgcataagcctctctgccaatcgaaggttcgagaatgttcggataccacaaatccgtacctttttttcagccataagaacggagacaaatatactattttagtctgaaaagattgtctcgattatgcatatcgcgctggagcaagcatactatgtagcaccggtggttccgttgcgtatctgctgcctcaactcgatcgatggcagtccttctagtccttcaatcactggatcggacgggaacttcctttttacgggttagcctagttgaccgggaagccccacatattttcacatgatccagctattctgatgtaatactgtcattctactcttcataggaatattctaggtac

SEQ ID NO: 5327 - DNA, 535 bp, Aspergillus oryzae
acctcattctttatatcttggtctaacttcccttgcctttagctatcaagagcctacctcataccctcgcttccaagagactcccaaggtctacgatcaggagctttccaaccagctagacatcactgagcgtgattatcgtcgtcgtgtcaaccaacagacctacgacgtctataacaccaacgctagctatcagcagtctagtgtagagtcctacgagaaccgtcaacccgtctcgtacgaccgtactcctgcccacccccagctcgacgtctcgtacgacaaggcttatcaagctcccaccctcgagacctaccccggctcttctcgcagccaacgtcaggtctctgtcgagccagtcaacccaccttctcaagtcaaggttcttagcactactactgtagttgattatccccctgctcgcaagatgggatactacgacgacgacgtttcccgtgacggtgcccaccacgccgtccgcgtcgttgagccccgcagcagcggtcgcagaagcgccgacaccgtgcccattccc

SEQ ID NO: 5328 - DNA, 537 bp, Aspergillus oryzae
gatctccatagtccggtattttctgcacctcgccaccggaagaacaagtccacgggcacagatctaaatggtgggcgaaagagaagccctagtcgcccaggggccacaggttatttgggagatactgatcgtgggatgtatgtcagtaccaacgcggacggaagcgagacatactatgtgaatgacgaggatgaaatagatgacggccctggcggcgagtatgtcacctacccggtaaatgagagccgatactcatatgcggggacatatgggaactatgcaagctatggccctgacgtggaatatgaatcggaggatgggtgtgctgatgatcggtataatggcgacttccaatttgctgtaggatgtccggatgaagaaatgcacggaaaggcggttgcacttttcgatttcactagggaacacgaaaacgaacttcccctgacagagggccaggtaatattcgtttcttataggcatggccaaggttggcttgttgcggaggacccgcggactggggaaagtggcttggtgccc

SEQ ID NO: 5329 - DNA, 465 bp, Aspergillus oryzae
gaccgaacggaaggctgtggaatttgaaaaacaaaaaagacagttctcgcccatattttctccccatctttccagcgccagaaactctgtacgtttggttcccccggcgactacccgcctgtgccagggtcatggaacatggggttgtcgtcggacaaaacttctttcgatcataatacccatatggcaattgttcttggggtgggacttggtgttgtttctctgatcatcatgtgtttgctatttaccatgtttgtgaaccgtcgtgatcagcgcccctgctcgaaaagcaagaaaaagggttcgagcgacaagctgcgcaaattggatgccgtgtctccggctcggactctataggaatggcgctccaaatcgaaagggccctcttacccaccgagggagtcgatggtcaatttgtgtgcgttgtttgccttgaatctgttctgccgtctcaggagatccggg

SEQ ID NO: 5330 - DNA, 599 bp, Aspergillus oryzae
atcatcctttgaaacaaagtcagaaccacaagtcacgatgaaggcatactggtacgacaacaagccgggtgaccagcgcgagccccatgactctggacgtcctgtctccaaagactacctcgcttctctcggagttttctaccgctactgccctgatatcgagtctgtcaatgctttggccaaggagcgcggatataagaaccgcgatgaggtgtgcgtttctccacagaccatgggcgatgtgtacgagtcgaaggtgaagatgttctttgctgagcaccttcacgaggatgaggaaatccggtacatccgcgatggtgagggttacttcgatgtgcgcggtcaggatgatgaatgggtccgtatccagctcagcaaggacgacctaatcatccttcctgccggtatctaccaccgattcacaaccgacgagaagaactatgttaaggctatgcgcctcttccaggaagaacctaagtggacgcctctgaaccgtagcgaagatgtcgataccaacccccaccggaagacatatcttggaactctcagcacaagtgctgtggctgcaaagtaaacgggtggcttgctaggaccagggg

SEQ ID NO: 5331 - DNA, 297 bp, Aspergillus oryzae
ttcgcgaagaatcagccgcacgatctgactattcttcgtgatttacagaagttccgtaccggtgtccagggactagagtattttccttggttgatggggcctagtcggaagaggttcattgggagacttactggtgttgagaaggctagtgagcggaattggggcacggctgccactgttacggctagtgttgctggtggggcggatattgttcgtgtccatgatgttaaggagatgtggcaggtagccaaggttgcggatgctattttacagggtggatgagtagggtcttgtttg

SEQ ID NO: 5332 - DNA, 303 bp, Aspergillus oryzae
caacaccgccgacatgggtcactctcacggtttgagatccggcactcggtatgccttcagccgtaacttcaaggagcacggccagatcgccctgtcgacctacctgaagacctaccgggttggcgacatcgtggacatcaaggtcaacggtgccgttcagaagggtatgccctacaaggtctacaacggtaagactggtgttgtctacaacgtcaccaagtcctccgtcggtgtcctcctctacaaggttgtccgcaaccgctacctcgagaagcgcgtcaacatccgcatcgagcacgtcaa

SEQ ID NO: 5333 - DNA, 288 bp, Aspergillus oryzae
tcttcgcgttgttagagcgattccccgaagagcgccaggaactcgcaacaatgcttatccctaaggacgaccgcaagaagatccacgagtacctcttccgcggtatgtgaacgacgccttcagtcccttgtcgcattgaccggaccaatccacctcgatctttgaagaccactgtcgctgactgattacctgaacagagggtgtgctcgtggccaagaaggacttcgagtccaagcatgccgacattgacaccaagaacctctacgtgatcaaggcccttcagtccct

SEQ ID NO: 5334 - DNA, 282 bp, Aspergillus oryzae
ccaaaaccaaaagaaaccgaatgggaattggaagaacttccttcagagtctacagagccgacagtcagtgaggaatatatggaagaggatatggcggagcgtgacagaagggaaagagaggcgcgagaaaaggcagcacaggctgaactaaagcgtcaatcacaagtctatcaacgatcattgccccgtccaagcgttctagatatagacgcgctggtcgaacgtgcgtcgcaggtgacagatccgattgccagcatgatctccaaagaggctgctctgcta

SEQ ID NO: 5335 - DNA, 516 bp, Aspergillus oryzae
ctatagtgaactgtgaggaaagatgggtaatgacggtggaagtatccccacccgccgcgagctcgtccgcgaggctgcgcgcgcccccagcaccgctcaagtgaaagaagcccagcgcgaactccaggaacactactggaagacatgtccactgtcacacaagccgctaatgcgaccgattgtggctgactgcgtcgggaacatgtataacaaagacgcgattctcaaattcctccttcccggcgaagaaatcgaaggaatcagttccaaagccgactgcgaagagatcctctgtggacgagtgaaggggctccgggacgtggtcgagctgaaattcgagattgacaccgaacaaagccaacacccctcgactaagctcgacaagcaagaaggttggatctgtccggtcactgctaagcagctcgggccgaatgtcaaggccgtctatcttgtgccttgcggtcatgtattctccgaagaggcggtgcgccagctgaaaggcgataagtgtctgca

SEQ ID NO: 5336 - DNA, 180 bp, Aspergillus oryzae
gtcctcattattctacacaaatgccgaccggggtccaaaacactaccagatcccccacagccttaccgaattgagaacagtcgaaatactacacaatcaccgcatattggctgggcagatctggccgtcaatgatggtgaaggtaacggatagcaatataaccgcgactacggtggttgt

SEQ ID NO: 5337 - DNA, 310 bp, Aspergillus oryzae
atggttcacaaatccgtcaaatcaatctcacgctccagtacttctcgttacgttgttactggtgcttcgtcagcctcgtctgatccagatatggaccggaaagtctacattccgctctgtttctgcctgatctccttcgctgtcatggtctacgtgaattgattcgaaatacacaagcgaacaaagaaaaactattacatcacatccatgaaacttatcgtcccgctttccaaagcaactacgaacagagtatagaccagcatgatgtccaggatcgagccctcgagccacatgtgcccaccgctcaccg

SEQ ID NO: 5338 - DNA, 315 bp, Aspergillus oryzae
cctcgtgccgaattcggcacgagggtaatctaatgtaaacgatcgcataatcaacctacatactggtccacccacaggatcgtgggtcatattggcgaaccagattgaagtgggcagcttaaggctcttctaccgtgctggattccttcgggggtctacgtgcgatggtggccggagccatcagctgctcatacatcctttactgactacctgtaatgtttaattgcgtagaatggtctgtggtcttcgactgcggtatgagatattcttgtaggggttcctgctatcaccttactggcaggatgtatctccaac

SEQ ID NO: 5339 - DNA, 466 bp, Aspergillus oryzae
cgaaagtgaagaacgccaaggcaaggccctgatcgacgagtcaatcaaacagcgcgtgcaacacttcgtccagacgtctgtagatcgtggtggcgatgcgtcgaccgacaacccaaccaatgtgccccatttcattaccaagtacaatatcgaacaacacctattcgagaagaccaaagacggtgttatggattggaccgttctgcgacccgtgttcttctttgacaaccttacaccagactttattggcaaagtgacttccacttcctgggacgcatatctacagggaaagcctctccaatgcatcgcgactagcgatattggcatcattgcggcaaaagtttttttacagcacgatcgattcaagaaccagtgtctctcctggcgggtgatgagcttaccttcgagcagatggcaaagaagttcaagactcaaacggggcagaattgtgccgactacattccgt

SEQ ID NO: 5340 - DNA, 556 bp, Aspergillus oryzae
gcggcacgaggatgaatttcatacatcagacctgaatacgcaaagagccaaagagaaggagtcaagcacacttcgcaacgatgtctacaaaccagcacaatccattgccatacacctacgagacgaaagtttataccgagggactcaacgacaaaaagcccgctatcacatttgatcctttcaaatgggagggactggctaaagagcgcctctcagcagatagcttcggctatgtctggggctcggctggaacgagagaaacagatgataacaaccggaaggcattcaggaaatggggcatcgtcccatctcgtctggttaaatcggactttccaagtttgaagacgacgctgttcggtgaggattacgagtacccgatcgcaatcgcaccagtgggggtgcagcggattttccaccgcgatggtgaggttgctgatgcttccaccgtacagaatgaggggataacgtacatcctgagttctgcatcttcgactagtattgaggacgtcgcagaagccaatggagatggatcccgctggtttcagttgcactggcc

SEQ ID NO: 5341 - DNA, 493 bp, Aspergillus oryzae
catccattgcaagatgagctctctccgcttcgctcgctctgccctccgggcccgtccctctgccttccgcgctcctctccagcgcagaggttacgctgaggccgtgaacgacaagatcaagctttccctggcccttcctcaccagactatcttcaagtccaccggcgttgtccaggtcaacatccccgccgagtccggagagatgggtgttctcgccaaccacgttccctctattgagcagctcaagcccggtcttgttgaggtcgttgaggagggtggtgctaccaagaagttcttcctctccggtggattcgccgttgtccagcccgactcccagttgagcatcaacgctgttgagggtttccctcttgaggacttcagctccgacgccgtcaagaaccagatcgccgaggcccagaagatcgccagcggcagcggcagtgagcaggatatcgctgaggctaagattgagctcgaggtgctcgagaccctt

SEQ ID NO: 5342 - DNA, 408 bp, Aspergillus oryzae
ccaacaacatatatttacacccaataccatcaatcctacatagcaggtacagctcactagtgatacatgaaaatcgggtaactagctcccgttcctcgagaaagataatagtgagaatccacagcggtaatatattttagcaaacttggagagaatgaaatcaacagccacatgcactgcgatgtgtctccccatcgccatcagagggagccatctctttaacatgtactatgctcaaggggagttacctgcgtcgggtgatggtggttcctcaacggtatgcctaatccgagaatgggatacacctactagtaggtcctgaagcgaactgccatggtcagcccgttgcgttgcgttgcacttgttcaatatttactcaaagcttttaaagtattgattgagcctatc

SEQ ID NO: 5343 - DNA, 529 bp, Aspergillus oryzae
cggcacgaggggtggaccaagcctatcatcattggacgtcacgccttcggtgaccagtaccgtgccactgaccgtgtgattcccggccccggcaagcttgagcttgtctacacccctgtcaatggcgagcccgagaccgtcaaggtctacgacttccagggcggcggtgttactcagactcagtacaacactgatgagtccatccagggcttcgcccacgccagtttccagatggccttgctgaagggtctgcctctgtacatgagcaccaagaacaccattctgaagaagtacgatggtcgcttcaaggatatcttccaggagatctacgagtccacctacaagaaggatttcgaggccaagaacatttggtatgagcaccgtctgatcgacgatatggtcgctcagatgatcaagagcgagggtggcttcgttatggctcttaagaactacgatggtgatgttcagtcggacatcgtcgcccagggtttcgggtctctgggtctgatgacctctaccctaccacccc

SEQ ID NO: 5344 - DNA, 363 bp, Aspergillus oryzae
cctcgtgccggcaataaaccacctacttcaagttcatcgcgaatccttcacatcctcacagtcccaaaatggccgatgcaggactccccactggcgatgcccctgctcccgttgagcatctcaatatcaaagtgaccgacaacaacaatgaagtcttcttcaagatcaagcgttcgacgcagctcaagaagctgatggacgcgttctgtgagcgtcaagggaagcagatctccactgtccgtttcttgttcgacggaactcgtgtacgcccggaagacacgccagacactctggagatggccgacggcgataccttggaagttcaccaggagcagatcggtggttaggaggcccatccgatcg

SEQ ID NO: 5345 - DNA, 443 bp, Aspergillus oryzae
ctttcctttggttacgaaaacactgtcgtcaccagctccctatcaaaagcttatgccctcgccgggattcgaataggatggatcgcattgcacagcaaatccatcctcgacctctgtatcaatgctcgctcctacgccctcataacagctagccaagtagatgaacagatcgcatcactggcattgagtccctcttgcgtccacaatttgatcaaacgtaacacaacgctagcaaagaataaccttcacattgttcaacggttcattgatgaattttcgtcgagctgtcaatgggtgaaacctgttgccgggccaattgggttcatcagatttactaggtccggccatccggtagatgacgtggaattctgcacaatgctcctagaaaagaagggagttcttcttgtgccggggagaaaatgcttcggggatgggaagaattt

SEQ ID NO: 5346 - DNA, 558 bp, Aspergillus oryzae
cggcacgagggactggcgagtccaaggttttttactacaagatgaagggcgactaccaccgttatcttgctgaatttgcttctggcaacaagcgtaaggttgctgctactgctgcccacgaggcctacaagaacgccaccgacgttgcccagactgatctcacccccactcaccccatccgcttgggtcttgccttgaacttctccgtgttctactacgagatcctgaactctcccgatcgtgcctgccaccttgccaagcaggctttcgatgatgccatcgccgagcttgattcgctctcggaggaaagctaccgtgacagcacccttatcatgcagctcctgcgtgacaaccttaccctttggacttcttccgatggccaggagcccgagggtgctgcttctaaggaagacaagcctgaagaggagtctgcccctgccccgaggacaagggtgaggaatccaagcctgccgccctgagtcttaaagcgacaaattggacgttttctttttgtatcaaaaacagcgttgtgcgctcggcgcctatttggagagggtt

SEQ ID NO: 5347 - DNA, 491 bp, Aspergillus oryzae
tatactgggtgataacgtttgcgaccatcacgctgcccacatggctattcacgctcttctcaatgagcttgaccttcactatgaatttcaccactctcttgttgatcgcgctggcgatcgtatcaacgatcagttggtttatccgttatcggttcttgaatatgtatagtcgtctgccttcggaaccccagcgcaaagaaccccatctcgatctcttccccgatgtccaggaaggggactccaaaccgggcctggccaattacctagacgaatttctaagcgccatcaaggtgtttggttacctcgaacggcctgtatttcatgaattgacacgtaccatgcaaacgaggaagttgattgctggggaaaccttgatgctggaggaagagaaaggcttctgtcttgtggtggatggcttggtccagatattcgtcaagtccatgcgggacgggaaaccaaatggagacgaaggttcaaaccacatgggagcc

SEQ ID NO: 5348 - DNA, 603 bp, Aspergillus oryzae
cctcgtgccgaattcggcacgaggcaggagagaggaaaaaacatggtcgaagctccttgcataaatctcggctacgacttgttcattaatttatctctgataccgaccttcaacaatctccgccggtttaactctccctaatttattctgattattcagtgtcaccgttccgacgcgtcttccggagcaaaacaaccccagtctatttttctcatattttttttgagatttggatttccactttcgtgattaatgactgggcggcattatcaacgtctcgcgccgaaggaagaacttcgccacccctgatgatcatagtcctgtcgagcagagcaaacgcaaacgagcctcattagcctgtctggagtgccagcgacgacgtataaaatgtggccctggccgtccatgcgaaccatgtttgctcaacagacgtgaatgtatctacaatgaatgcaacgacaaacgccgcaagatctccgccgaggccaccgagcagaacctgaagttttatcgcagcgccttggagaatctcttacgcgccattcagatcggctcccagtcggatgtggaccacatcatcaatgatattcgcaaaggcgcccc

SEQ ID NO: 5349 - DNA, 276 bp, Aspergillus oryzae
cggcacgaggaggagctcgaagaggttgagggaggagcgggtttagtagctctgaggatgggatagctatgagttatgaggttatggtcatgtttttccctgtcaacctgtgtggttttcaggagttctctgtttcttgggttggcgtctggctggatcggattgtgatttttatagtttcgggaaaactatgatcaaaacgttattcgcattaagcgctgcgattgtatgagtctcttgatagcatgttaattcatttgagttaagacaatatgg

SEQ ID NO: 5350 - DNA, 328 bp, Aspergillus oryzae
gcggaatcgccagttccataattcaagatgacgaagggtacctccagctttggcaagcgccacaacaagactcacactctctgcaggcgttgtggccgccgctctttccacgtccagaagtcgacatgtgccaactgcggttacccctccgctaaggttcgcaagtacaactggagcgagaaggccaagcgccgcaagaccaccggtaccggccgcatgaggcacctcaaggaggttcaccgtcgcttcaagaacggcttccagaccggcacccccaagggcgctcgtggccccgagagccagtaaatcaatcccgacgtcgcgtttt

SEQ ID NO: 5351 - DNA, 518 bp, Aspergillus oryzae
gaaattgatggacgagttggcaaagacggtgggcgaggagaacttggccattcgtctctcaccattcggattgttcaaccaagcgcgcggggagcagcgtgtggaaacctggaccttcctgtgccagacattgaagcaggcccaccccaagctgtcgtatgtcagcttcattgaacctcgctacgaacaaatcttcagctacgaagagaaagatgacttcctgcgcagctggggtctccttgatgtggacctcaccagcttccgcaagatcttcggcgacacccccttcttctcgggcggcgggtggaaccaaaccaactcctggggagtcttggaagaggagcgctatgatgccctgctgtatggccggtacttcaccagtaacccggatctggtgcagcggttaaagaagggtatccccttcaagccgtacgagcgtagccggttctacgggccgtttgaggataatgccgtgtgctatgtcgactatcctcctgcggaagctcagtaatctttgg

SEQ ID NO: 5352 - DNA, 330 bp, Aspergillus oryzae
cggcacgaggcattcaccctctacttcggattcttcggacggtggaactacgaccggaaagtcacagccaatgtactccgccgagtcgaaaatgcgcgcgttctcattcagcggctccccacacaggacgaactagatgcgatggtcacacacagcagtcgcagtttgtaccacgagcggatcggcgcgccactgggaggactcgtcggatcagcgctgttgtggaaccaggccaggaagtcggagttgtatccggcttatttccccaaggcttcggggccggaggggaagatgccgtctccgggggagattatacaggccgcgaagagg

SEQ ID NO: 5353 - DNA, 456 bp, Aspergillus oryzae
cctcgtgccgaattcggcacgaggtggggcagtatcatcgctcgtgtcatggccaaccgctactctgaccataccaaggctgttcacctgaattttctaccggtgcctctgccttatccatggcggagtcctttggtctttcttcgatccctcctcaccattcccttttcatcagatgacaaggctcacttgtcagctacttccgactatttaatgcaagggaatgcttacatgcgtcagcaagagactcgtccacaaacgttaggctacgccctccatgacagccccgtggcgttgctcgcctggatttacgataaactacattcatggaccgatagctacccgtggacggacgatgaaattctcacatgggtgagcatctactacttttcggtagcgggacccgcagcgtcagtccgaatctactacgaagccggcacgaaaatgattcttcct

SEQ ID NO: 5354 - DNA, 565 bp, Aspergillus oryzae
gtggacaggggaaaccccgtgaggattattcatcccgtgaaacctcaggccaacggacaacgtcatttcgggatttaaattctcgttttgtgcccctctatcagcccctcacccggagctaattaatatcttctctagttttaaatcatccactgcttgtctttcctccctttctcctgttaggatctcatccagagcaatcgcatctactacctcccttcgccccttcgtcggcacgcacttcaatctcactcgacgaactttttcctctacccccaccgttcgattcacaccttcatccaccatgtctgagggcaatgttgtgaagatcgaatccaaaaaggattttcaggagaaggttatcgaatccaaggaccttgtcgttctcgactgcttcgctgagtggtgtggtccttgtaaggcaattgcccctcagcttgctaggctcagcgaggagtatactggcgccaaattctacaagatcgatgtcgacgatctctccgaagtcgctggcgagcttggtgtccgcgccatgcccacttttctcttcttcaaggatggtaag

SEQ ID NO: 5355 - DNA, 464 bp, Aspergillus oryzae
ggcagtcaaggtgtatgcggaggccaccgtagttttcccaatgatggttgcagcctcatttgctcgggccgaccagtcttctgcaaatgcagctgaccaggcccagaactaaggaaagagtcttctttttttttacggtagcaggcggggtaagctacggacacaggaccgtgcgatgattagacgaagatcacgccagaagcctggtcggagacggattccctcgatcctctaattctatgcagtgtctagaggtgtgttgagccccttgcgggtacgctgcctgcttctcgaatcagacactccattagggctccagaggtggcggcgacagaaccccaccagatgtgtcttctcggtggtgtcggaagaggtaagatattcattctagaagggaggcgaaccggatgataagctccgatgacagaatctgccagggaaccgaggaagggaaaaaaggaaaa

SEQ ID NO: 5356 - DNA, 542 bp, Aspergillus oryzae
ggttaggtcaatcatcccgtctttgtgcggagaaatctccgtctatcagaccaactcatatcgtgataccctacctgacgagtcgattctgttgcggcacggcaaccagagtgctgtcattccaagcttgctgtccttatggcggaatgccgtaaaagcaaccggaacctttgatgcgtctaaccgctgccgagtttccgccatccaagatatcaccttaatgggcgaacatttaaagggtattggtcaccttcctgccgcttctcgccagactcgccaagctgaaggtggagaccatgatgctctgctgattacagaacaccgaatcataatccttactccacgactcaatgagccggatgaatctcctgcgcttctagggtcggtggacgagacaccaaccgcagaaactgatcagctgaggcttcggcgtggtgaacttgatgttgaaggaatggatcgactactgagtgggatgaccaagcagtaatcaaacccttcgaatgggaagtcctatcaagcgggcgcggattttcacttga

SEQ ID NO: 5357 - DNA, 514 bp, Aspergillus oryzae
cggaacgaggttgacatataccttatttgatcgcacttcctcctctatatacccccagtccgtacctctattaattatcctcccacaaaatgggtgtccagaagaaaacccgcaagttcgcccaggttaaacgagccatcaaaaagcacgatgaccgcgccaaaaaagacaacaacgccccgaaacaagacaaggccaagggcgacgaggtagtccgggcgattccccaggctccgtcgaatatgttcttcgccgccaacacggccctcggacctccttaccatgtgctggtggataccaactttgtctcccactctattcgcgcgaagacggatatgctgaagtctatgatggacctgttatatgcgaagtgtatcccgacgtttacggattgtactattgcggaattggaaaagttgggtgataagttccggttggcgttgagggtggctaaggatccgagatgggcgcgcgtgcggtgtgatcaccccggtacctatgctgatgactgttt

SEQ ID NO: 5358 - DNA, 299 bp, Aspergillus oryzae
cctgtctcttctcaatggcaatgtctctcatcaacatcggctctaccgtcgcgtttaacgccatgctctccttatcaaccactgcgttgatggccacctatctcatctctatcggttgcattattgctcgtcgtatttcctgcaacccaccacttccaccctcccgatggacgctgggacgttttggcatgcccgttaacatcttggccatggtgtatgccagctggtctttcttctggagtttctggcccaatgcgtacgatgtcaatgctgagaattttaattgggcgtcggtgttg

SEQ ID NO: 5359 - DNA, 487 bp, Aspergillus oryzae
gtgacgactttgctcggctccaagcaggcccagaaatatgctagcccccgtctcgaggctatgaaggctgtcgcacgcgctcacgccaatcgatcccttgaagaatatgaaaaggctctctcggactaccggttcgagctgggcagagatgtatttattcggaaccaccttcgccgactttatgatgccatgttggagcagaacctaattaaggtcattgagcccttcagccgggttgagctggaccatattgccaagatggtagggctcgacaccccgcaggtggagcggaagctgtcgcagatgatcctggataaggtgatcatcggtgtgttagatcagggctctgggtgcttgattgtattcgacgagacagagcgcgatcaggcatatgacgctgctctggaaactatcgagaagttgagcaacgtggtggaagagttgtacactaatcaggcatcccagctggagtaaatgcttctggtgg

SEQ ID NO: 5360 - DNA, 508 bp, Aspergillus oryzae
aaacacgaaggagtcgaagaaaatcggtttgcaaggctgtatagagaggtggcacgacgaaatgcgaagactgtggctgcatggcaagcttatggcttcatgaatggcgtcttgaacaccgacaacacatcaatctatggtttgtcgcttgattacggcccattcgctttcatggacaacttcgatcctcaatacacaccaaaccacgatgaccatttgttaagatactcgtataaaaaccagccaactatcatttggtggaacttggttcgacttggggaatccttaggagagctcattggggcaggagctaaagttgatgaagagagttttgtgaaagaaggggtaaccgaagacgccgctccagctatcgtcaaacttgcagaagacattattggaagagtgggtgaagagttcaggactgtattcttgaatgaatacaagcggctcatgggcggaagattaggactaaagactcagaaagagtcagattttcaggacctctttt

SEQ ID NO: 5361 - DNA, 530 bp, Aspergillus oryzae
aatccgcaaaccatggccctaaagaccgttatgatcaccggatgtagcgacgatggcatcggtaatggtctggcactgactttccaaaagcaaggctatcacgtctttgccacggcccggaatgtcggcaagatgaccaagctgaatggtttgtctaatgtcacccttctacagctggacgtcacagagccgagccaaattgaagcagccgtcgctgcggttgaggctcagacaggaggaatcctagatgttctcatcaataacgcaggtcgcaatcacttcatgccttacctggacgaagatgtcgaacaagtcaaggccctctatgacatcaatgtttggggaccactgcgagtgaccaaggcctttgcaccattactgatcaaagcgcaaggcttcatagcatttatcacctcgatctctggatatgtgaacgttccattcatgggaacctatgccggctcaaagcgagccctatagctcatggcagatacgcttcggctggagttgatcccatttcatgtcaaggg

SEQ ID NO: 5362 - DNA, 386 bp, Aspergillus oryzae
aaacgtccgggaaggtgtcaagttattgaagtcgaaggctgtagtgcttgaagcgatgcaagagcggggtctccaggttcacggactcatttatgatgtcgcctgtggtatgctccgggatatcgacaccaaggactcggaggaagagatcaagaggagactagtggccttcaagacagaggcttagggaaggaaatcggtgataggtcttccgccatttctttcaatgtttttttgcgttgttcctttcagcgattatccgggtgtatttggagtgtttttggacgggtattcctgtggctgtctgaacgatcttagcatcatctcagctcagcgactatgctgtaaatattccagcactgtgaatctcatcgacgtcagttgtc

SEQ ID NO: 5363 - DNA, 527 bp, Aspergillus oryzae
cggcacgagggctgagtctgacagtatatatgctgctctaggcgctggcttttataggagttgctttgcttagcattcaataccgtctctcaacgcaacaacgaggcctcggtgcagatggccaagagtgccttggtggataatacgatgatgaaggcggttgctattgtcagtttggtttatttaccagggacttttgtgtcagcacgtattctatatcctgaaaaaaggtggtgttaggcggcttatcgagataggtatcttcgggatgaactttttcaacttcgataccaatgagtcaggggccatgacctggattttgtcggataatgtctggttatattggcttgttacgattcccttgacgcttactactatggcggtatggatactgtggttcaatcgcaatgtgattacgcgcattatctgtggatggacaagtgggagctcgggagttgtgaggactaatttgctttgctagcgtacattgacggtgagaatcaatgaatgaaaagcaattcagtaat

SEQ ID NO: 5364 - DNA, 603 bp, Aspergillus oryzae
cctcgtgccgaattcggcacgagggcgcccataaactttcattcgacgctgaagccgcgtcgcgtgaggcattttggtaccgagaagagctcctcaaaagagtatccgggttctggacggagagccctgcggggcggaaaggaatgattgacctgagaaatttacgcttcagttcgcgaatggtagatgccttccgactcgaagatgtcgatataacatttgctctaagtcccccatcttccgatataattagccccaacggcgacagtgttgtgcagatcggacggtcaaagtacaaggtccagatcgacgagatgcttagtctcaacgtcactatccgcaaccgatcctcaaggcctatccatcccattctccgactccagccaagccttcgtcaccaacccaacaatattgcccttgatttgtcaaagcgcctcgcatggaccggtatgttgcagcaagtgctacctgtgatacatagcggtgagagcacaactgctaccgtcggtgtaactatcctttgtcggggagagtacgagttcggcgcgtctgtggaggaattgcgcttcttgagaccttcgcctggtaccgaatcagataccc

SEQ ID NO: 5365 - DNA, 571 bp, Aspergillus oryzae
cgaagtcgtcatctatcaaaatgcaattccgctccgttatcgcccttgtggctttcgctactgccgtcaccgctgctccctgtgacagctgtgatggtggcaactctggcgactctggtgactctggcaagtgcagccctaaccaagaactgaagtgctgcaccggtctcacccaaggcctgaacctcggcatcctgccggccctgtgtcttcgtaagttttgaatcttgataatttttatgttcatctataatcccatattagctcttcttgccaactgcaacaaccaggccgcctgctgcgaggccaatggaggactcctgaactgtctcaccatccagctctaagttcatcgcatttcaccaccgcgagtaacgatacacgggcgatgtccggtgggggagtgatgcgcgactcggtaaatggatatgtcttactacggttgggcggtgacagtcttcttccagcatctaagtgtacacggattggcctaagtccgaggtgtggaaattgaaatattagattacatcgctaggaaagctcaatgcaactttggcagtatgtatatcgg

SEQ ID NO: 5366 - DNA, 482 bp, Aspergillus oryzae
ccaaatagctatccttgtcgtgatacattaacagtaacacatcagagtataattttatctatttctttttaatatttcctccttacagactttacaatacatcatggatctcgtcaccaaatggggccatttcagtaaggaatacaagcaaaggagaaaatccacgtcctccaccgaagaacataagggcggcgaggaacataagggcggcgaggaacataagggcggcgaagaacatgaggaacagcgggcgttcaactggcttttgggaaaattcggccgtcctcacaatgatcatcctgataggagatcgagtggtgcggggaacatggcaacagatatcgatgaatggagacgcagccagaagaagtcgacttcgtctcagcaaggagtccctgatctgaagtcccaggaaggggtctcggatttgcgacctcaggaaggtgtttctgatttgcacctcaggaaggaatttccgattt

SEQ ID NO: 5367 - DNA, 467 bp, Aspergillus oryzae
gcctcgtgccgcctatccagaatgaaagacttaccaaagttgatctatatcgatacgacgaaagctgggagcgaagtccagtagtccttttcactcatttttacaatacccccaacgttttgtcggaatgtctcctaagtgacatcaagctgaggcccctgtgctgtgttctagacctgagaacaacggcggacttcgcctcatggcatcttcctggctcggtcaatattcccttgcggagtctcgactcacacactgtgaagccgttctcggaccccggtgtactagaggcacagtggtcagagttagaagcaatgttcaaggatccgagcgtgatcaccaagttggattcccaccatgtgttagtgatttgctacaatggagacacagcgcgagtggccactagcgtgctgcgagccaagggcatcgaggctgacagccttcggggaggataccaagctctgaaa

SEQ ID NO: 5368 - DNA, 584 bp, Aspergillus oryzae
gagattcacattggctgtcatgcagatcataccctaaccaatgatcgggtaccctgtattctttaaaatccaatatctaggaacaacatatggaagacagaccaatctcccttcattattattcttacattcggcttaggagactgctggtacaagttatccgggtgcgggtgagagctcgatattaaccagacagtcgagaagtatagcagccccgaccagaacatatttaaattcaagaaaggcttgaagtatgtccgtctcgtaatcggcaggactcgcgggaagcttgaattacctgaggccgctgcgctagtatatccgcacctcgaccgggcagcagtggaggccgtcagggcgagagcagaatgggggacaagttcaagcatgcccaggggtgggttaacgactatctggacaggaaagtactgctaattgtgctagtcaagaccccagagcttcatttgctaaaacattgctaacaggaaacaatgataggaagtgcagcatccaggtattgcgctggctggtacgtctgacaagcgaaagcctttgaagttgccatataatgaccataatcaccc

SEQ ID NO: 5369 - DNA, 589 bp, Aspergillus oryzae
tgcgcggtctagattgtctggacctctagacgaaccaaactagttcccctggcgatccgataacgttggcaatgtcttaagtcctgcaggtcaagccagttcgggttagtccgatagtattggagacacggatgagtgccgaaagaaagcgctcgcccggatacttggcatgactcactcccatggtagacctcgtatcccataaataacattgggaaggagagagctgtcgcataattgcgtccattggaaatatttgcatatccggcctgtttcccaagcaatattacaaccatggcctctcacgctgatcttgaccctcacaccaaccccgcgcccggctcactgaaacaagtctacgcgacgtcatcaccgttcgaggaaaagattggctattaccgagctgtccggcatggacgacaaatcttcgtttctggcactacagccgtcgaccccgcgtccccaagcgatgcccctcagattctcttccctggggacgcccgtcagcagacacgtgtggctctgcaagaatgcattcgggcagtccaagccctgggcggtaaaggagcggagaatgtggtgcgtgtga

SEQ ID NO: 5370 - DNA, 573 bp, Aspergillus oryzae
agtccagttcagtagatttgttcagcactgccgtgactgggtatccagtactacccgcgagttgactgacttcttccatccccagatcttttccttctcagaccctccacaaataatataaaccatcatggtagcccacggtgacatgatgatggacatgtccatggccacagcaacatccacaggagccatgagctcaagtacggcctcccactcaatgagcatgggaggtatgcacggcggctcaaacagctgcaagatctcaatgttatggaactggaccgtcaaagacgcctgcttcctctccaaacaatggcacataacctccaacggcatgttcgccggctcctgcataggcgtcatcctcctagtaatctgtctcgaattcctccgtcgcgttggccgcgaatacgacgccttcatcctccgtcgcgcccgtctcagagcccaataccttaccgtgcaatcccaacccttaaccccagccgcagcctcagacgcggaagatgtcgccacaggcacaaaagcctcttcatctgcgcagccttccgcgggaaaggcacccaattgtcc

SEQ ID NO: 5371 - DNA, 539 bp, Aspergillus oryzae
actaggccatctgaacctcggcgctcgtctttcagcccccgaggcagtttctcttcgtcatattccttctcccggagtcagtcgccccagtcacttgaggacacccgacttcgcaaatttacccaagagaataaagactacgatcacgtcaagaacagtttcaaatttgatcccagtgatgagctgaagcctttaccaggcgataaggcaagaattgtccggtcgcgggaggagaggatagggttaagtcgacgcacttgagatggcaagttgttatgggtcatccaataacccaataacctaacaacagtcagattcgggtcatggtttattgtcttcttttcgcatatttttacgcatcttgtctatcggctatacagcaatggtcaagttgtcttcgctctccacggtcccaattaatgcatgcctccgaatatttcgttattctaggatgagtggatttgggcaatgatatctacagctgttatacatgtcatttaccatataactgccataacaggctctggagggttcgcaaa

SEQ ID NO: 5372 - DNA, 255 bp, Aspergillus oryzae
ctcttttacattcgttcccatgtcgaagtgattacactcttttgtcaattcgaccatacataaagtatatatctctagaaaagtccgcctacctgattaggctgtcattccttttatccatacggtgataattcttaataatctacaatgcctattgctagtttttttactttcataatgcatttttcatcgctctcattgcctctcacggctttgagccttgtcactccttctctagcatatcctcagttcaag

SEQ ID NO: 5373 - DNA, 479 bp, Aspergillus oryzae
agatgaaggatgatattaccggcgagcctctcattcagcggtctgatgacaatgctgagacccttaagaagcgtctcggaacataccatgcccaaaccgcccctgtcgtggattattataagaagactggtatctggcggggaattgatgctagccaggaaccgggtcaagtgtggaagagcctcctcggcgttttccagcagaactaataaacgtaatgattcttttttctttcgccgaggggtgagcgctcctgcgatctctgcgtctccgtcggagaggtcaacaaaatgtgataaggtatactgttcttaacgaatggtttgctgccttggttggcttatgcggggtttcctttttgatacatggactttttttgtatccttcggatatccgtacctggcggctttcggcggagggttgggtttatgtatagtagctaatctcggaacctaaaatataagttgatttagacggtc

SEQ ID NO: 5374 - DNA, 270 bp, Aspergillus oryzae
atctggaatggcgattcaccgacctggagaaggatccgatcgaactcaaacccatcaaacacttcagtctcatggatatggccaacgaacttgaccagaagtacggacaggacgtcgtggactggcttcgcgatgccgcacatgtcactgagtggtgggtgctcgataattggcaccgctatcggtacattccgcagatcaagatctcgaaagacggcaaaatttccaagggcaaggactcgggtgacaagggctcagacgacaaggact

SEQ ID NO: 5375 - DNA, 264 bp, Aspergillus oryzae
aggaaaggtttcttttaattttgaatttgataaaagacatggtgaaggatttctgttggagtacggatagtactttgattgattgtggttttggtgggaaataaaaaagacgaaacctggtggtagcgggggagacaaaatcagaattttagcaaagtggataaggacggtagtaatggaggggtggccgatatttatacgggaacgaaagagacgacacgtagcaacccgtgatgagatcatcccaggtcacgttgggcattc

SEQ ID NO: 5376 - DNA, 506 bp, Aspergillus oryzae
ccagagtcttcgaccgtcgaaccatcttgggtccgcgacagaaaaggtcacttggcgcccgatgagagccacctgcagccaatagagcatctcatcgcgaattatggtgatgcgacttccacatcatggggtgatgaacgttttaagatttggcgtgacctggcgaccggcgcagcaatctcatatgtgcctagcagcagcaattatgcagtgatcccaggcgatcctttgtgcgattctgggcagtattcgcgtgtgatcacgcagttcctgcaatggatgcgtcgggagactaagtataagcccatctggctcttatgttcccctcaggttgaggctatcctgggcgagaaacttggttggcgtagcttgtcttgcatcgcagaggagcgtgtagatccgtcccgcaaccaagctgcttcagatggggaaattgctcggaagatccgacactcggagagcgagggcatcaagctcgtgagcatgaaccagggtgagatggtacc

SEQ ID NO: 5377 - DNA, 499 bp, Aspergillus oryzae
cggcacgaggcagtgacgttggcataagaccgtctatcacattcaggaaccatcctgagggtgtagagggaattattgctctcgactcacaactccgaccttgaccaggataaccctcatcccggatgctgaattcgacacaatcggccttgtccttattcctagagtagtgcaattgttgatcgtctgactcgtcagctctcccttccgttcccctccctcccactacggctgtgccatgttggaaaactgtgtggattacattcacgactagctaccataacgcataccaatgcagaccgccttcatccttacactaagtgctggctcatggtgtctgatggtctctggccatcgaataggtagtcggggataagcttcagcggcgcaatgagccggtccacttccgccctctcgcggtccccgtcctcagcaacccaacggccggctgcccccgaattaagtcctgtccttgacaagttgaaagttatctgcgggg

SEQ ID NO: 5378 - DNA, 507 bp, Aspergillus oryzae
cagtcagattgaaattaccattttagcccccgacgatccgttcccaaggagcacagagagaggcgtccacggcaaaggaagaaatcgaagacctggtgggacgcaatctcggaaacatatgtcaagggcgggggggaacagcgatggtttaccgaacgccactctaacaattcgccaatttgtcgaagacgaaatcttccggagcctctgcaaggggttagggaaattaccatcgtctgttttcacctccggactatcgtcctccagtgccgctgtccagcatcctcacacagagagcgatgacaacgatattcctatcaacatacatacgactgaggccacacaccattactcgcacgtatacatacttattgtagcacatacatcgacaggattcagggtgggacatgatgcgctctttggcgtcaacggcgatcccggtgcgcgacaagcgcggcataagtcacggaacggtccggaggaggcggcaatggtggtgaaaaattt

SEQ ID NO: 5379 - DNA, 192 bp, Aspergillus oryzae
gcgaagtatccgaatgttgtggcctggtatgagaggacgattgagagtgagggggtcaagcaggcgtttggggagaagaagtttgttgagaagaggcctgctttccagtgatctttcttttactatgtttagtgagattgggctggacgcgcagtctggattatgaggaatgaatatgaaaagtataagaat

SEQ ID NO: 5380 - DNA, 306 bp, Aspergillus oryzae
tgggtttccttcgtctagtctaatgtttccggtggcagtctctcatctatgaccaagattctcggcgttcttccggcggttcatgctggtagtgatcattgctgtaattgataggttgatgggttcattggtccttcagcgggacatctttatacccttcattgcatcgaacgcggagtccggttgcctttatcggtggtctttctcggagtgtgttggtttggaatattgtttggatgacagatcagggacccctgatgtcactcgtttagccgtcggtgccgactgttatctctctctctctct

SEQ ID NO: 5381 - DNA, 483 bp, Aspergillus oryzae
cggcacgaggccgacacccccctccgcgacgatacacccagctcgacttcgcttcctcgtcgaactgaattctcgcaacaatggcgaccgagttgaccgtccagtcggaacgtgcgttccagaagcagcctcacatcttcaacaaccctaagactcttgcgaagagcaagaaggttggccagggccgcagatggtacaaggatgttggtcttggattccgtacccccaagaccgccattgagggcacctacatcgacaagaagtgccccttcactggtatggtctccatccgtggccgtatcctgaccggccgtgttgtctccaccaagatgcaccgtaccatcgtcatccgccgtgaatacctccactacgtccccaagtacaaccgttacgagaagagacacaagaaccttgctgctcacgtctctcccgctttccgtgttgaggagggtgactgggttaccgtcggccagtgccgtcccc

SEQ ID NO: 5382 - DNA, 588 bp, Aspergillus oryzae
cgctgaaatatactcggggatcgacgaaccacaaggagcagctcaaggagaaattgagcacgccccaggatgctttcaagttccttctgcagagatgtttttctgatcctaacctatccgaggttactagcactgatgatctggcattcatttgccatcgagtcgttcatggcggagagtatgagcgatcggtagtgatcaccaatgaaacctatcaccacttggagaaactcgaggatctagccccactgcacaacttctctgctttggagatcatccgactctgtagaaaggaactaccttcggtgaaaagtatcacattcttcgactctgcctttcatcagactctgccgattatgtaaagacatatccaatcaaccaggataccgcgaaagcaaatggtcttcgaaaatatgggtttcatgggattagttattccttcatcctgcgctcggtagctcagtttctcggcaagccagtggaaaagactaatgtgattgccatgcatattggaagcggtgcctctgtatgcgcgatcaaggagggcaggtccattgacacatcaatgggacttacacccctagctgg

SEQ ID NO: 5383 - DNA, 439 bp, Aspergillus oryzae
tactcaccgtgctggtcaggctgccttcggtaaccagtgccgctctggtcgtatgttcgctcctaccaaggtctggcgcaagtggcaccagaagctcaacctgaaccagaagcgcttcgctaccgcttctgctcttgctgcttcttccgtccctgccctcctcttcgcccgcggtcaccgtgttgccaacgttcccgaggttcccctcgtcgttgagtccaagaccttcgagaacgccgctctcaccaagaccaaggctgccgtcaccctcctgaaggctctcggtgccggtgacgacctcgtcaaggtcgccaagtcccgcaagatgcgtgccggtaagggtaagctcaggaaccgcgcttccgcagcgccgcggtcctctcgttgtctacaaccccgaggttgatggcaaggagctcgtccgtgctttccgcaacat

SEQ ID NO: 5384 - DNA, 126 bp, Aspergillus oryzae
cacagatgatgtgctcatcataccttcggggagtttttcggttgttaagttatgatctgggatagctatgctggatacctttgtcttctatccaaattgacgtaagaatacatacaatcatggaac

SEQ ID NO: 5385 - DNA, 524 bp, Aspergillus oryzae
cttcctcctccaccctgcctcttgttgagagacatatatatggagatgccacagaccaggctatcctcaggttctctgagagcttaggtcccgtttcggagctacgtcaggcgtggaagatgacctacgaactgccattcaatagcaaaaacaaattcatggtccgcacgtttaatgcggcacaacccaacggatatggattggcactctcggcagctgaagcagtgcagtttagacaaagtgacggtctcttaacaatcaagggtgccccagacatcttgattgagcggtgcacgcatactattggcctggatggtaatgtggaggcgcttgacgacaatatgcgaaggaaaatgctcgaggtgaaagaccgctggtccagcgaaggccgacgtgtcattctacttgctcgcaaaattcttcagcagcagaaatccttgtacatccgtcttctcgtgaatttgagtctgaaatgatgacccaagcaaagactggcttagttcttgtcggtctagttggcatcg

SEQ ID NO: 5386 - DNA, 337 bp, Aspergillus oryzae
attcgcgcaccgccaaaatgttccgcaccgcccctcgtatggccggattcgtgttccgcgagaaccgtgtcccttactaccagcgtcttttccagcagcacgacggcaagcgtcagtggtggaagaccgagcgtagcaagtacgtcatgtacccctacctcctctccgtctacggcctgggtgctgccaccacctacgctatgatccgcatggtcttcggccacaagacctggttcggcaaggattaaatgggattctcaccaagctacatttgtcctaatatacaaaatacagcctcgttgcgattggcggtgtatctctattttcaagatgggtt

SEQ ID NO: 5387 - DNA, 539 bp, Aspergillus oryzae
gtcaagacccgagtccaacttcaatccggcacccgcgccgccggcgaagagttctacacgggcatgttcgactgcctgcgcaagatcgtcaagaatgagggcgcatcccgtctgtaccgcggcatctccgccccgatcctcatggaagcgcccaagcgcgcgaccaaattcgccgcaaacgacagctggggatccttctaccggggcctcttcggcgtcgacaagcaaacacaatctttggccgtcctgaccggcgcaacggccggagcgaccgaatccttcgtcgtggtccccttcgagctcgtcaagatccgtctgcaagaccgcgcatccaagtacaaccggcatgctggacgtagtcaagaagatcgtgcaaaccgagggtcctctggctctgtacaacggtctcgaatcgacactgtggcgacacattctctggaacgccggatacttcgggtgtattttccaggtccggcgcaattgcctaaggtcgaacctggcaacaagacgcagcagacgcggaacgacctcatcgcggg

SEQ ID NO: 5388 - DNA, 549 bp, Aspergillus oryzae
catacagatcaatcattggatcaagattgtccttcgtctctctaaggtggacgaaagagatccgactaagcggagacatttcgagatctctatcgattctccatttcacctactttcgtgcaaggccacacaggccaacatttatctcccagcatatacctcgccaaattcggatcctgcgccgcctgcccaggaatacgaatgtgggtgtccaggagccgccgcgctcaatagagccagctcgaacggccactctccgtgctctgaggcagaggaaccgccgactagagcagttaaccgaagtttcacgaatggctctggcggcttggcacgacctccccaggcgcatttggcccacgagccaagcgaccgtgcagatgagcctccaccgcgtcctatgcatcttctccgcgccccgtcatttgctccaccggcatttgaagatgttccaccaccggcaccctcataacaccggcttctgaatacacttctatagtcggcaataacgaccgggagacggtgctggaggattatttctctcggctatcg

SEQ ID NO: 5389 - DNA, 405 bp, Aspergillus oryzae
cgactcagcacccatacagtaggtcgtcgctaactcgatccgttcttccgagcttcttagcatggcaaacattgaaaaccccgttcacctttggtgggatagcaatcacttaataacttgttcagtatactgtcctatgacgaagtatatcgtattgagtgagaacccagatgcgtggggattcagcttagtaacttcatatatggacaatggactgcccccatccactctcgcccagtgagtataaatctcctaggattaaacctacagagctactgcgtcaagtagaacttgtggtagtactctggagactggcctcaacgcctcaggttgctgtgtatcttgatctctacctccgccgtctcaggttagaaagcggggatgcatgggacgaagtctcggggg

SEQ ID NO: 5390 - DNA, 422 bp, Aspergillus oryzae
ctggaccgatgccagggcccgcgtcctcaagtcctacagagaatggcttagagcgtcccctgagatccagaccatgtactctctgaacatgccggtatccgccatccgcaccaaggtccgccaggagttcgagaagcaccgctatgtgaagcagctcggtgctgtcgatgtcctgttattccagagccacgctgagttccaggttagtccaaattgggtctttgctgacatgcgaagatgctgagtgcacggttacgcttggcccattgcaaccgtaacattctcaatgggattaagtatactgatcctcgtctctacgctctaggaaacccttaactactggaagcagctttctcatgtgatgaagtacttcgtccagaggaagaccccggtgcccggctacctcctaacttcatctcggg

SEQ ID NO: 5391 - DNA, 480 bp, Aspergillus oryzae
cggcacgaggcgaccccaccgatgagcctgtggcagaagagaagttcgattggtcattcaacgatgctgacctaccggtagacacctggaagatcatgatgtactcggaaattctcgacttccataatatcgatcagggtaccgaggcgagccaagtcctcgttgagggagctggcgatgcccagcaaaattttgtataatcgggttcctattttttgcggacgaggcgcaggcaatagtgcagcgtgtttctgaggttattctcttgttattctctttgttctccttggttggtatgtagactgggcatgaaggctgtgatatctttacatctacggatactttctcattcactgtcacgtggttgttttgcaaattctgaggcgcttttgccttcaggacctgtggatttactcacgacgttattagaatcggggggttgaaaatcagttttgaccttgattttccctttctcttttg

SEQ ID NO: 5392 - DNA, 590 bp, Aspergillus oryzae
cctcgtgccgcatttccaccgtgaacaagttttaccccatacgtacatccaaagatggatacttccaccaccccgtccgcaccacagcgcccgcacttcaagcggcctgtttacattcctcctgtcaagggcaatattggtaaatggtacctcccaaccatggggatgatagccctcggtaaacctctcctctcttcacctcaacaaaacccctcaaaaacatctatctaacaattcaatcccaggcttcggcgtctacaattactacaacgcccccactcctgcctacgaccccgaggaagcagaacgtctccaccgcaacaaagccttgatggatgcatacggagacaaagagaccttacaagatatcgagcgcgcgttcgctctctacgagattcagtaatctctgactgtctcgacgaatgatcatgatctcggactggttctgataggataggatactgcatttgtggagtttgggtgcttggattgtagcgatgattttggtttatttatgttattattttatttaacgtgagatctgggatcttggctgtatgctggcatatgagttaattatattttttttt

SEQ ID NO: 5393 - DNA, 269 bp, Aspergillus oryzae
cagctcgccgcgtaccagttgcatggctcctacgcccagccccataccactatcacgcaccaccttgatctagccgatgagaagggtctggtcctcatgcatggtcagattatgccaaactcgggtattacctcgactgacgcgacctggttggttagctgtgttcagcgcttctatgatttcggtggccaggctagtggacgcaagggcgagctgctgcgctcgttcactaagggagataccaatgtcttcaagctcgaagcgttgtt

SEQ ID NO: 5394 - DNA, 514 bp, Aspergillus oryzae
cctcgtgccgaattcggcacgaggcggcacgaggccggattgatcctattgtccatttatcccgaatcggtcaacatctacgccgtcaatccgatcaacaccaaaatacttacttctccgcaacatctcccttgagccctccgacctccgaacaagagtcgcgttgtcttattaaacaaaaaggccaatatgggtggttcattttcgcgtctatggtccttcctctggacgaagaaggaaatccgtattctcatcctaggtctcgataatgctggaaagactacactactttacaggatgaagatcggcgaggttgtcacgacaatacctactatcggtttcaatgttgaatcggtcacatatagaaatttgaactttaatgtctgggatcttggaggtcaaacgtctatccggccatactggcgatgctactacgctaacacccgctgctgttatcttcgtcatcgactccacagatattgaacgactgggtacggctgcagaccagctcgca

SEQ ID NO: 5395 - DNA, 575 bp, Aspergillus oryzae
ccgtcacccagcgccgttgcggaactcagtcgacaacaatggtaagcatataacgtccagttgatttagttgtctagctttcgaaaacctctgcgacatgtcgtgagacgatctcgtcgacttcatttcgcaagtctcgaagcatattccgctgttcgcacaaatccttcgggatgcgagcgtcagcgatgatttggctggagacattggtctagtcgttgaaatatacactagatcagtgttctctctagagttcaaagaagatgcagcgttggtggacacgatgtgctgatcttcttttctcaatgatagcctcccaagtccggaaagaaggccgcccctctgccctacccccagggcaaggctggttctaagaaggcccccaagaaccctctcatcgagaagcgctcccgcaacttcggcattggccaggacatccagcccaagcgcaacctcggccgcttcgttaagtggcccgagtatgtccgtcttcagcgccagaagaagatcttgaacctccgtctcaaggtcccccctgccattgcccagttccagagcaccctggaccgcaactt

SEQ ID NO: 5396 - DNA, 646 bp, Aspergillus oryzae
tcccaaggctatcctgaacatgtctgagtgctccgaggaggaggccgccaagttccgtgagaagtccgctgagttcgcccgccgtggtttccgttcccttggtgttgccgtccagaaggagggtgagccctggcagcttctgggcatgtaccccatgttcgacccccctcgtgaggatactgcccacaccatcgctgaggctcagcaccttggtctctccgttaagatgttgactggtgatgctcttgccatcgctaaggaaacttgcaagatgcttgccctgagcaccaaggtttacgactccgagcgtcttattcacggtggtcttgctggctctgctcagtacgaccttgttgagaaggctgatggtttcgctgaggtcttccctgagcacaagtaccaggtcgttgagatgcttcagcagcgtggtcacttgactgccatgactggtgacggtgtcaacgatgctccttccctcaagaaggctgactgtggtatcgctgtcgagggttccactgaagccgcccaggccgccgctgatattgtcttccttgcccccggtctttccaccatcgttgatgctatcaagctcgctcgtcagattttccagcgtatgaaggcttacattcagtaccgtattgctctg

SEQ ID NO: 5397 - DNA, 580 bp, Aspergillus oryzae
cggttctttcaacactgcaaccatgctgtcatcgtccctccggtctctcggccgcaacggcccttcaattgcctcccgcgcattcagcagttcctcctcggcttatgctgccgaggttaaatcattaggagtaattggagcaggtcaaatgggtttgggaatcgctcttgttgctgcacagaaggctcaagttcctgttaccttagttgacaactcccaagcatctcttgataagggcctcaaattcgccgataaactccttgataaggatgtttccaaagaacgtattacccgagaggtagccgataccgtccgctctcgcatcacaactagcctgaagatggacgacctttcatccgcggactttgttattgaggctgttccagaaatacccgatctcaaaagctctattttcaaacaacttgctcaaattgcacccaagcatgccattcttgcaaccaatacctcgtcaatctccattactaagattgctgcggcgacgacaacgaatccgacagaccttcaagctccttctcgagtgatctcgacgcatttcatgaacccagtttcctatacagaa

SEQ ID NO: 5398 - DNA, 526 bp, Aspergillus oryzae
ccgaaatggagcattggtggccgttggaacgacaagatttttgctcgccatactcctggatatgaggtggacgtatccagtcaagatccggagtcgtccaagacgtttttggtatggcaatgccactcccgcccaagcggtatcccgttcaatttaacgcctttcgttatcacattgaatgcccttccagaagatctaaaacagtatctccccccaactgacacccgacttcggcccgatcaacgtgcaatggaggagggagaatatgaaattgccgctgacgaaaagcatcgcgtcgaagaaaagcaacgagccaaacgaagagagagggagacaaagggggaagagtaccagccaaagttcttcactcggaaaaagtgcccgatcaccggtgaagagtactgggcgcacaatgggaagtattgggcagccagggaagcacgggactggagtatatgtgaagacatcttctaacaatgagatctatgccgtagtcgagtgttaaagtatcaagggtttgatcttc

SEQ ID NO: 5399 - DNA, 537 bp, Aspergillus oryzae
cattcacaatggctgacgaggatcaatatcgtggagacgaccagatcgatgaggaagaggaggagaccgacgagagtgtacacactttcaaacacacctgaaagcttcggaggctaacatgttatcaaccaaaatagggatacaaaacagtgaaagatgccgttctttttgctatcgaagtcagcgattcgatgctcacgcctcgtccatcttccgattcaaagaaacctgcggaggagtcccccacaacggccgcactaaaatgcgcatattatctcatgcaacaacgcattatctctaatccccgtgacatgatcggtgtgctattatatgggacgcaggcgtccaaattttatgacgaggatgaaaatagtcgaggagatctttcatacccacactgctaccttttcacagaccttgatgtcccctctgcgcaagaagtcaagaatcttcgggcactagcacaagacggcgatgaatcaaaggatgtacttaaggcgtcaggcgagcgggtctcaatggcgaacgtactctttt

SEQ ID NO: 5400 - DNA, 225 bp, Aspergillus oryzae
tccttctgttagcccaagcattccgttacgagcgatgccaatgatgaagagcatttctagtctaagcacgatcatgaccattgcattttaacaagatagcctacgcaagacagataatgcaaaaatgccagtacacgtcttgtgaaacgaggctgtccagtcttcctctaattcaagaaaaacaagagaaaacagagaacatcaaatacaatcaatttcacattc

SEQ ID NO: 5401 - DNA, 492 bp, Aspergillus oryzae
cctcgtgccgaattcggcacgaggcctcgtcccaccggtaacgtctcctacggtgaggtcttcgtcaagcagatctatgatgccattcgccagggccctcagtgggacaagaccctgctcttcattacctacgacgagaccggtggcttctacgaccatgtccctccccctctcgccgtccgcccggacaacctgacctacactgagactgcgaagaacggtcagaaatacactcttcacttcgaccgtctgggtggccgcatgccgacctgggttatctccccttacagtaagaagggatacatcgagcagtacggaacggatcccgtcacgggcaagcccgctccctacagtgctacctccgtcctcaagactctcggatatctctgggacatcgaggacttcacccctcgtgtcgcccactctccatctttcgatcacctgatcggcacgactttgcgtgaggatgctcctattgctctcaagattccc

SEQ ID NO: 5402 - DNA, 578 bp, Aspergillus oryzae
catagaggctgactcttacaaagctgatgcttccttgtcagaacaaggggaggactatgctaagaaaatgactgaatgtctactgaggcacagagagtccgagaagcaagcaacaatcgaccaaggagagacagactatgagttgaaaccattgacagtttggacttccaccaggcgtaggacaatcgaaactgcaaagtatctttacgagaaaggatacaaagtccgacagagatcacaactaagccagttgaacccaggtgtttgcgaaaagatgtcagaaaagaagattcgtgaagaatatccagatgaggtagcaaagcatgaactggatccttatcatcataggtaccctcgggcagagtcgtaccacgaccttgctgtgcgccttgaacctataatattagagcttgaacgctatattatggcatgtaatgccgcggatattccatttctagagttccctcgagacgagataattgagatcataccggaaagctatcaaaatgaggctcgtaggatccatattccggaccttcccaaggaaatcattcctggctcttcacaagacatcaaaa

SEQ ID NO: 5403 - DNA, 466 bp, Aspergillus oryzae
gaccaacgcgacgcgaatcctcttctacaatgcctggaacaacaggggcatgggccagatgataggcgaggcaagggtctcctacccaaacaaggtgcgagggacataccggtcccttcaaagccacgacgtgaggaatgctcaaccgggcaatcggatcagacctggacgtaacaagatgtgaaaaacaaggctcaggccggacgaagtccattccttgagggcattctcagctgaaaaacaatcactcaaggtgtttgtttgtggcgctcaaggggaaactgacataccaaacggcgatgggttaatgtcatccggatgataaaaaggtcaaccatgtccaaccgtctcgtggtggaggaaacgagaagtcgcaaggccagattagaagtctttctttcagatactttccttaattgatatttattgcggctgtgcttgccctttggccttcagcctgttttcg

SEQ ID NO: 5404 - DNA, 534 bp, Aspergillus oryzae
cctcgtgccgaattcggcacgaggcggcacgaggctagtttctccctccggtgttcggctttagaagcatcacagaataaaaaaattaaaaaaataaaaaggaaaaaaaaaagaggagagaggagaaaagcaaaaggaattgacacctgtgtcagaggaactcaaagggtcaaattgccgaccgtccttggtatcgctctaaacagtcccttcgattgcacgtactccgataacttccagtctgggttgcgagcgacaatggatgagctgccgtgcctgcttcacttactcacgtagcagcagttggaccttgcgctgtcggaccttgtttgctgtatcggatattccctaacgccgccgcgctgagttcgcgcgagcatcacacattatgaactcccagacaccgcgacgagagcggtcatctagcgataaagcccaagccatgttcgttccgcagcggccgggccttccaggtcgaacaatttctgcccctgccggtggtctgcataaacttgattcttctaaagtggcgat

SEQ ID NO: 5405 - DNA, 467 bp, Aspergillus oryzae
cggcccaagccaaggaccggcagttccttgctgtcatcggagatgaagactcggtgactggacttcttctcgcaggtgttggccatgtcacagacccccccgactcccaacggaatttcctcgtggtagactctaagaccgaaacctctacgattgagaaagcgttccaaaacttcacccaagaaagaaaagatattgctatcgttctcatcaatcaacacgttgcagagcgcatccgccatagtgtcgattcctttgccgatccatttcctgcagttctagaaattccaagcaaggatcacccgtacgaccccgagaaggatagcgtgcttaaacgggtgcggcgtttatttggagaatagatccagggagtaccctgttctaccttttgtttgtcctcatcgtgttataaatgtcatatgtggttgtgggataatggaaccgttgtgcgcaaagggatgataccc

SEQ ID NO: 5406 - DNA, 492 bp, Aspergillus oryzae
ggtcttcccatcgttacaatggcttcgcgtcttgctaagagcgccattggtgctgcccggctccggccgaccgtctcgcgcaacgtcgctcccatcgccaacctgaccgtgtctcgttcggcctccaacgtccctaccgaggaccccaagaagaaggctcagtcgattctcgatgccctccccggcaactccctggtctccaagaccgctaccctctccgccgctgccggtctctccattgccgctatcagcaatgagctctatgtcatgaacgaggaaaccgttgctgctttctgtcttctcagcgttttcaccgccgctgctaagtacggtggtcccatgtaccgtgagtgggctgagggccaggtccagaagcacaaggatatcctgaacgctgccgtgccgaccacaccaacgctgtcaagtcgcgtatggacaacgtccaggagcttgctggtgttgttgaggtcaccaagcagctcttcgctgttt

SEQ ID NO: 5407 - DNA, 538 bp, Aspergillus oryzae
cggcacgaggtcttcgcaacatttactccctgaaaggcaaacccatacgtcccatttctcttatcgactggtccttaagcctatacaagcaaaaatgaagctcaacatcggcctcctccttgttactgctatacccagcaccattcttgctcgggttgttccccgaggcgaggaggctgccaacgataccccagctgccaagcaattagccaacgtattcgctgcccagaaatgctggactcaatctccatacggctgctcgaagaacagatggtgctggcaacgatgtcaaggcaatggtcaatggtgttggttagcccataagggaggaactggcgattggacatcttgtactactgctgaagattgtatacctggagtgggggattccgattgtgctaaaggggattgtaaggcgtgtgggtgcagttgctaaagcatagagaagtcaaccctacctttgtgaagatgtacactctattgagatggataaacctttgcggtccttagttttaattgagatcagaatgaagttatc

SEQ ID NO: 5408 - DNA, 488 bp, Aspergillus oryzae
gcctggctacctcgaccttgtcgtcaaggtctaccccaacggacccatgtctgagcacctgcacagcatgaacgtcgaccagcgtctttccttcaagggccctctccccaagtaccagtgggagactaacaagcatgagcacattgccctgattgccggtggtaccggtatcactcccatgtaccagctcatccgccagatcttcaagaaccccgacgacaagaccaaggttacccttgtgtacggtaacgtcaccgaggatgacatcctcctgaagaaggagctccaggatctcgagaacacctacccccagcgcttcaaggctttctacctcctcgacaagcctcccaaggagtggaccggcggcaagggctacatcaacaaggagctcctgaagaccgtcctccccgagcccaaggaggagaaccagaagatctttgtctgcggacctcctggcctctacaacgccgttagcggtaacaaggtca

SEQ ID NO: 5409 - DNA, 549 bp, Aspergillus oryzae
tccgaaccgcacaaatccattaacggggaagtcgcaagcaacgagggaggtacacacgagactgctgaaccatcctcagcacgggaaagtcttaccgattcttcgaagactaatggattgcaaaatgtggcacatgagcatgaggaaggggacatgcctacggctgccaactctgagctagaagactataggactcaggccgaggtacagcaacagccagctgcggtcactgctgcccgtcgtcggtacttcaaccgcatcataacgaactgtgtccttcaattgctcatgatcgaaactgtccatgaactcttctccaacgacaaagtttatgcacagattccaagccacgagcttcttcgactaatgggacttctgaagaagagttaccaatttgcgaagaaattcaacgaggacaaagaactgcgcatgcaactttggcgccaaggattcatgaagcagccgccaaaccttctcaagcaggagagtggaagtgctgcaacctacgtcacatccttttccgtatgtaccatgatgagagagaggaaa

SEQ ID NO: 5410 - DNA, 242 bp, Aspergillus oryzae
ggatccggttacggataaggtgccggtttttggggtggatatgtgggaacatgcttattatttgcagtacttcaataacaaggcctcgtatgtggagggcatctggaaggtcctcaactggcgcactgcggaggacagattcaagaatggggtggagggctctgcgcttttgaagctgtagatcagtcgaagtctgagtctttctgcttagcaagtagacaaacataaatatgaatatgcat

SEQ ID NO: 5411 - DNA, 427 bp, Aspergillus oryzae
gaaaacccagacaagagggctatcccaaccgcagatgccgaggcctatgcacgtgaggctggtttgcttttctttgagacatcggcgaagacctcctcgaacgtgcgggaattgtttaccgcaattgcgaagaaacttcctctcgaccaagccggacctcgaaacttgcgcacaaacccccgtccgggtgtggacttgcgcccagaggcccctggcactcagggcgccaactcctgccaatgctaaatttaaacgcaagctatcacctttgtctcgctgtatctctcatgttcacattctttccccccgtcctttcaattatttttagatacggaaggtgcacgtcttgaaggttagctatgaagtcgctacgccgggtgactctatgggccaccaccaataacttaaaccagaatgcctaattttt

SEQ ID NO: 5412 - DNA, 533 bp, Aspergillus oryzae
cctcgtgccgaattcggcacgaggacttcagtgaggtcatcgaggattgacagtatggatcgagattgaccgactgatctttgtcgtcggtggctgtcgaggtagatctaccatcgcgctttgttctcgatcgagaagggctagaccgggcgaaacctgttttctgcagtgccgatcgttgaagtagtggagtctaacttgaatcatgctgtagcgagggctgagccacaagacaggtactagccacatcacctgagccacagtggagagtttgggtagataatatccagatggggacagctgcaatagttctgcactgtattcatcagcttgcagaaggcgccacaatccacataccttaaagtgggtgcgttgtggcggttatactttgtgatagaacgaagtatctttgggtcaccccgtgcagagctcaaatgatcagccggggaagcggtggtcgacgcgtccgtcagtcctattttctcccttgtcacgaagctcgcaaccaagaaccaggaaaatcaacccggggg

SEQ ID NO: 5413 - DNA, 186 bp, Aspergillus oryzae
cctcgtgccgaattcggcacgaggacactcgtgtctgatccccaccgtccgatgtggctcttccgggttctctcgtccgcctttttcctgtccgtgaccgtttcttccatccctctggccttcgatataacacaacaggatgggcggaacgaacctttaccggcaagcgaacgcagaacacgtctg

SEQ ID NO: 5414 - DNA, 538 bp, Aspergillus oryzae
tttgttttcggtagcgaaggataagattgtgtgcgcttggtggtcggctaacggcgagcgactcggtacctataacggacaccagggtgctatctggaccgtcgatgtgagccccaacaccgttctcctggccaccggatcggcagacaacaccgtgcgactatggaacgtgaagactggcgagtgtattaaggtgtgggacttccctacggctgtcaagcgggtcgaattcactccggatggaagccggctgctggccgtcacagagaagcgtatgggcttcttgggtaccatcgccgtgctcgatatcaactatgaggacttggaggctcaggccgaggaacccagcttgaggatcacctgcacagagagcaaggcaacagttgcgggctggagttatttggccaagtacatcattgctggccacgaggacggtagccgtcagccagtacgattcgaagaccggtgagcagttggagaacgttcaggcacacgagttcgacaacttgatcagcgacattcagttctccgcagaccg

SEQ ID NO: 5415 - DNA, 652 bp, Aspergillus oryzae
gatgagctcggctatccaaatctagaagacgagcggattcgggacgaacttcggaaacggtatggtggggagcccatccgtacggaaggtactaggggccatagcaatgcgccagctgtactgatcgtaatggacaagggcaacggcgttgttgacgctttttggttctatttctacagcttcaacctggggaacgtagttctgaatgtgcgatttgggaaccatgtcggcgattgggaacactgtctcgtgcgattccaccatggtaagcccaaagcactcttctttagtgcccatagcgcgggcgaagcatatagttacgaagccgtcgaaaagaatggggaacgaccggtcatctactcagcgctgggaacccatgccatgtacgcgactcccggcatccacgactatattctgccatggggcctccttcatgatcagacggaccgcggcccgctgtgggatcctctcttaaactcccattcatatacctacgattatgacaacgatactttgcttgcatctactttcagcccggattcacccacagaatggttctactacaatggccattggggtgacaagttctatcctttgggagatcatcgacaataccgattcgcaggccaatatcattatgtgaacggtcccc

SEQ ID NO: 5416 - DNA, 561 bp, Aspergillus oryzae
tatcaagacctccaaggaagtcgctaccgccatccgtgccgctatcaccattgccaagctcgccgttctccccgtacggttcattttcaatcgccatatatatccaacatggctgacgctgctcctcgtggacgtggaggattcggttcccgcggtgaccgtggtggtgaccgtggccgtggccgtggtcgtcgtggtcgtcgcggcggcaagcaggaggagaaggaatggcagcccgtcaccaagctcggtcgtctcgtcaaggccggcaagatcaccagcatggagcagatctaccttcactctctgcccatcaaggagtaccagattgtggacttcttcctccccaagctcaaggatgaggtcatgaagatcaagcccgtccagaagcagacccgtgccggtcaagcgtacccgtttcaaggccgtcgtcatcatcggtgactctgagggccacatcggtctcggtatcaagacctccaaggaagtcgctaccgccatccgtgccgctatcaccattgccaagctcgccgttctccccgtccgtcgtggttactgggg

SEQ ID NO: 5417 - DNA, 631 bp, Aspergillus oryzae
cctcgtgggcatttcgtcactactttgtaacgtaactcaattctattgatacataaaaattacatatcaactatggctgcctctcttatccgtacctctgcccgtaccgctcttcgcgctggagcttcggctactcctaaagctgcgggtgttgcgggtttgacctttgcccgtggcaaggccactctgcctgacctggcttatgactatggcgcccttgagccctctatctccggaaagatcatggagcttcaccacaagaaccaccaccagacctatgtcaacagctacaacaccgccatcgaacagctccaggaggccgtcgccaaggaggacatcaccactcagatcaacctcaagcccctgatcaacttccacggtggtggccacatcaaccacactcttttctgggagaaccttgcccctaagagccagggcggtggtgagcccccatctggagctttggccaaggccatcgacgaaagcttcggcagcttgggagagttccagagcaagatgaacgccgccctcgctggtattcagggaagcggatgggcttggctcgtcaaggacaagcagaccggaaacatcggcatcaagacctatgccaaccaggaccctgtcgttggtc

SEQ ID NO: 5418 - DNA, 597 bp, Aspergillus oryzae
agttccgcgaccatggccaacatcccattcccaaccgtgccctatccgccaatggagccaccggctcaccgtgagaagaagatgaaggtgcttgcgctgggcatgtcacgcaccgggaccatgtcattatacgttgcactgaagaagctaggatacaacagctatcatatggcagaatgttccctagaccaacacaatgggtcgctaggcctctggacgaaagccatcaacgcaaaattccatggcaacggtcggaagttttcgggcgcagattttgaccgaatgctttggcgctatgatgctgtgaccgatattccctgcattctgttcgccgaagaactcatggatgcatatcccgacgcgcaaatcgttttgactacgcggccggttgattcctggttgccgtctatgcagcagacgttttatgcaatcttaagttggaagcgctgggctttgcttgagttcattgatagagtacctacccatcgcacccctggtcccccctattctggatttgtttctaaaagtttcgaagtcctacataggcctatacatccctctcctccggtcctctctatctgtatggaccggcggaaa

SEQ ID NO: 5419 - DNA, 629 bp, Aspergillus oryzae
gtcacatctcacaacgaagactcgccagttaatggtaactatggagaagtcagaaaatcggccttatggccaataccactatgttgagatcccaacttctcccgatgcgaccccgatgcatgcccgacgcggtcgcatctctcgactcgcagttgccctgagtttcatctccttgctcacgctaagcaccgtgttcttcgccatcccaggcatcaatttctctgtctgtcacaaaatgagggggaaatttggtgcgcttttatccactccgaagggtggtgagacacctgtgccggcatcaagcaacaaggtcccgcttgaggctcatatcatgagcaaatgtccagatgcgcaggactgtctccagaaactggttgttcctgctatggagcagatcagtgagaaagtcgatttcgagttgtccttcattgcaagcgtcactaatcaatcatctgatatacattgcaaacacggccctggcgaatgcattggcgacatgcttatgctttgcgctcaggacctacctttctcacctgagggtgagaccgagaaaactactcgcatgcccaccatccgtccctcggatttgccaattgtcttgtcggccagtacgaggatattccggaccg

SEQ ID NO: 5420 - DNA, 585 bp, Aspergillus oryzae
ctgcaccgctacatctcccctttgagcttgctttccttttattctgtttctgcctcattgtcccgagacacatatatcaaggacttgaatatctcaacatggccactcctactctaaccttcacgagctccgacggcgttgacatccctgtcgaacgtgatgtcgccgaacgctcgcagctcattaagaacatgctcgaagacttgggtgaaactggagagcccattcctatccccaacgtcaacgaagccgttctgaagaaggtcattgaatggtgcacccatcataagaacgaccctcccagcaccggcgatgacgatgattcccgccgcaagactacggatatcgacgagtgggatcagaagttcatgcaggttgatcaggaaatgcttttcgaaataattctggccgccaactaccttgacattaagggactacttgatgttggctgcaagaccgttgcgaatatgatcaagggcaagtctcctgaggagattcgtaagaccttcaatatccagaacgattttacacccgaggaggaggatcagattcgtcgcgagaatgaatgggcagaggaccgctaaa

SEQ ID NO: 5421 - DNA, 221 bp, Aspergillus oryzae
atgtatatatctgggcgtttttcttgtcggttatcgcatgggctacgtaggtgctaggtactctgctctctttatctgtcggctttcctacttggcggtccctgcatgtgtttcttccaactgtagatgtttgcggttgtctgcgggggtcgtttcttggttgattctaacaaggcatttacgtgatacgtccaatagcggaaaagcaagagttcactccg

SEQ ID NO: 5422 - DNA, 589 bp, Aspergillus oryzae
gtctcaacatggagtccttcaattctactactgcccttccccaaatggcttcatatacagacctcatcaagctggcccatcaaaaccccaacctgtccagcatggaaaacctctgggaggcttactactcctattggaacaatgatatcctcgccacaggaattatcaccttcatcgcccatgaactaatttacttcggccgctgcctcccatggatcatcgcggacgcaatgccaggtactttcaaccgatggaggatacaagatcacaaagcaccaccctcagtagccacccaatgggactgcactaagtatatactcgccatccacttcatcgtcgaacttcctctcattgtcctctttcaccccatgatggacctctgcggcctcaaatatgcttcccccttcccagacctcaaaactctagccgcccaacttgccatcttcttcattgttgaagacacctaccactactggttacaccgtgctttccattggggccctctctaccgctccatccaccgcatccaccaccaatacgcgactcctttcggtctcacggccgaatacgccagcccctgggaaaccct

SEQ ID NO: 5423 - DNA, 393 bp, Aspergillus oryzae
cggcacgaggcggcacgaggcgatcgctcattttcagagttgaaaggctcgacgggtcatgcccccggcttcgttggtcaattcaatgaatccgaggttctcacacgccttgcaattgaaactgtgggagaatacacgaaggtacccggcggatttgatgttgttggaggtcttgagattgctaccagctgtgaaggtgtcgcccgattaagatcgagatgtgagatggccaagagagctggactctccgccgaattaatatcctccgggcaggcaactagcttggccccagaactggtcaatgacgacaaccaaatagccttgtactttcctggtgatggtgctgcgaacgctatcagaataactacgttttatcacgaaaacgcacgggct

SEQ ID NO: 5424 - DNA, 433 bp, Aspergillus oryzae
aggtcggtgagaagaaggaccgtgtcgttgacgccctcaacgccactcgtgctgctgttgaggagggtatcctccctggtggtggtactgctctcctcaaggccgctgccaacggccttgacaacgtcaagcctgccaacttcgaccagcagctcggtgtcagcatcatcaagaatgctatcacccgccctgctcgccagatcgttgagaacgctggtcttgagggcagcgtcattgttggcaagcttactgaggagcacgccaaggacttcaaccgtggttttgacagctccaagggcgagtacgttgacatgatctccaagggtatcgtcgaccccctcaaggtcgtccgtactgccctggttgatgctagcggtgtcgcctctctccttggtaccactgaggtcgctattggtgatgcccctgaggagaa

SEQ ID NO: 5425 - DNA, 394 bp, Aspergillus oryzae
aattgaacaactttggactcgtttctccatccgtcatcaactccaccgtccggatagcaggcggcattgtgaaatgcatattcaggaccatttcccttctctcaggtttcacttcgtccagcatgtgtctcgatttaaatgaactgctgttcgatgcaatgatacagtcggccggtgcattgcgatcgacttctgcaaatgtgctgatcttcaatggcagtttctctggtacggcttctacaacaagccaggcgtctgttacggcggcggggatctctgtaaaggtcttgtatgtaccaccggtgcgttgagaaggggtaagagctgtgaactcctgaagatgactgttgatgtagctggatgcgtccgagagggcttgccgaggagggatcgc

SEQ ID NO: 5426 - DNA, 400 bp, Aspergillus oryzae
cagcttgattaccaggctcccatcaacttcaagcttgagtacatgagcaacgaaaaggccgacaagagccaagcggctgccgagtcggccgagggcgagaacaagtctagcgagcctggccctggccgtgctcgtccagtcgtcatccacagagctatcatcggtagctttgagcggtttctgggaatcttgactgagcactttggcggcaagtggcctttctggatcagccctcgccagatccttattgttcctgtcatgcctgctgtgaacgactacgtggaagagctgcagactatcttgcgcggtgataagctgaacgtcgacattgacatcagcggaaataccatgcagaagaagattcgtactggacagctggcccagtacaacttcatttttt

SEQ ID NO: 5427 - DNA, 341 bp, Aspergillus oryzae
aaattgcgcgacgaatcgaatgaaatcaaacagaaaatacatactctccaagctgaacttgacgctagtttggccttggccagggaagcatgtgctgaacgggatgagccgcggacaatgcttgacaacagacaggctgagattgctgaaagtcgcgtggaggaccaagaaactatggaggaaatgaagaagctactagcagagattgcggcacaggaaagtggcggtgcctccgaagcttcccagaagtctggtatggaactcacgaaacaggtcgttgaacttatcgagcggaacctagagagactggcacaacgcgctgagtatatcacaaccaaaaa

SEQ ID NO: 5428 - DNA, 309 bp, Aspergillus oryzae
aatcagattgcattcaagtgcaaatttctctgacaacaatttctatcgcagctgcctcgtcttttttcaacaacgcctcaatggcttccccatccctccgccagtactctttccaagtcttccgcgatgttcctccgcttcgccaaatgcgccggcagctagtgctggataagaagaccgtagggttcgttcctaccatgggggctcttcacgagggccatctctcgctgatccgacaagccgcggccgaaaacaccgacgtcttcgttagcatcttcgtcaacccgacccaattcggtgtcaatgagg

SEQ ID NO: 5429 - DNA, 404 bp, Aspergillus oryzae
ccatcgtagttctctctccgacgaattatccaagtctggaactatgcaacctagtcctaaaaagaaggtcacttcgttcaaggaacatgatggcacgataaagcctgtcaaggagccctctggagacaatgatgaagatgctatcgagagcgaggacgaggttgacgagagtgctattgaagatgaggattctgactgggaggactctatcacagagagcggacgctcgagtctcgatgagagagacatgttccagcgggtcgattcaaggcctaaccttgtctcgcgacgctccctcttgacaatgatgatgcatcagccaactaaaatgggagctcctacgcgctccagtccagccttgcaacggtcgcgtttgacatcaccaaacggcccatccatccccg

SEQ ID NO: 5430 - DNA, 515 bp, Aspergillus oryzae
accggtcaggactcttgaccgctattgtcaaagatgaagtttcttccccttccagagatcgaggatgtgacgagttccctgaatttcgacaccggtgattgccacattttaggaggctgcgatctttacacgacaaaggcagcacgtgccgaccggaagttgtataagaacatcgaacagtcgcttgaagcgcaatacgaatcgactcttcgcctgtccgcatcgttgtcgcctccaaatgcgtcggacgcggccgccaccgcggtggagctccagcttttgttccctttagtgagggttaattgcgcgcttggcgtaatcatggtcatagctgtttcctgtgtgaaattgttatccgctcacaattccacacaacatacgagccggaagcataaagtgtaaagcctggggtgcctaatgagtgagctaactcacattaattgcgttgcgctcactgcccgctttccagtcgggaaacctgtcgtgccagctgcattaatgaatcggccaacgcg

SEQ ID NO: 5431 - DNA, 355 bp, Aspergillus oryzae
cggcacgaggaacacgttgggttgttgcgatctcagtcactcgctttgtttacttggtcaagggtccgctcatatcatatcagccgatctgcatgtttcaccggcccaccagtcttgaataggacttttacaaccccccgttgccatttctttccgcgcagaaccattcgtcagcattgcattgaacacgatacacctcgctaggttcatccatccaccatcagtcaacgttcgttacttggacacaatcgctcggaactagggaggccacagatccgaccgttgacttgaatttgagatcttaaggggttcatcgaccccccatattctggtccaagccaggcagtgaatcttt

SEQ ID NO: 5432 - DNA, 342 bp, Aspergillus oryzae
cggcacgagggccgactacatgctcgaggagcggggtcggatcgaccaaagccacaatgtgatagacggcgttttgagccaagcatacgccatcaacgaaaactttgggcttcagcgcgagacgctggccagtattaatcggcgtattgttggagccgctagtcaggtgcccgggatgaatgcgttgatcgggaagattgggtcgaagcggaggcgagatgcgcttatcttgggggcctttatcgggttctgctttttgatgctgctttttttccgataagtgcatgttggttccgctttagcttgctgtcagatctctactttagcggtgtgattgtcttg

SEQ ID NO: 5433 - DNA, 493 bp, Aspergillus oryzae
aaactgcggcggatcggtctggtcaagtgcaccttgatcaccgatcgcagtatctcggcactagcacggccgaaggcctcgccccattcatccattagtagcctggagagagttcatttaagctattgtgttaatttgaccatgcctggaatccacgctctactcaacaattgtcctcgactcacccacctcagtctgaccggggtgcaggaatttctacgggacgagctcaccaaattctgtcgcgaggcgcctccggaattcacgcatcaacagcggcaagttttttgcgtattcagcggtgacggcgtcaagcaactccgcgaccacctgaaccgaaccgtccctccggcccgggaaatgaacgaggctaccatgtatgacgatgacgaagaactagacgaggatgaaggtcaagtgactggcctgatgcatgcgacagcaattaacgacgatgatgacgactatattgacattggacatcctcaaggtt

SEQ ID NO: 5434 - DNA, 270 bp, Aspergillus oryzae
caggaccgatgagtatggtggttcgtttgagaatcggattcgtctgcctttggaaatcgcccagttgactcgcgatacggtcggccctgatgttcctgttttcctgcgtgtgtctgcctccgattggctcgaggaggtgcttcccgagcagagcttcaatgtcaacgagacggtcaagttcgctcaggcgctcgtcgcccagggtgccgcggatctgatcgatatcagctccggtggtgtgcacgccgcgcataaggtcaagtccggtcc

SEQ ID NO: 5435 - DNA, 336 bp, Aspergillus oryzae
gattcaaccgccaccatggctggacatactgaagatcacagctaccatcctaaggatgcgatccaggcggcaatgaagaccactatgctcactggtggagtgggtctcttcgcctcggcagttcagaacaccctcaccaggaagaacgttgggccattcggtgtcttcgtgagaagcggcggcaccgatcggtgtattcgcggcaatgggaggtacctatgagttcgtgaagactgcgtcccgccaacctgcgggagaaggaggatcactggaacgtcgcattgggtggtttcttctctggtacaatcctgggtctacgagcccggactttccccg

SEQ ID NO: 5436 - DNA, 533 bp, Aspergillus oryzae
agttgctgctgtcaatcatcgcttttttagaacggttcttgcttaggtcctacttctaagtttatagccaagatgttctctcagacccttcgccgtgctgcggcccagactgctggtgcctaccgctctcctttcgctcccaagtacactactcctcttaacttccacggtgtgaccgttggcgctgccaccaagtatgcccagattgccgccactttcggcgccagcgctggtgtcttcgctctcttcttcttcggtgaagttccccgtgtccgcaacgatatcctgcgtcagcttcctttcttcgaccagtacttcgaccgcaccattgcccccgaggacaaccccttctaaacctttccttacgaagtacgatccatcaaccatatcctactcgcagggatttcttatgtttgcgcatatgctccctatcagctatatagtggaggaaggagtcggttctgtactgtgtagaatagcagcgatgaattgtgacagcacatagacacgcctccttaattatcacttccttt

SEQ ID NO: 5437 - DNA, 303 bp, Aspergillus oryzae
gacaaccaaacccgacaagccaaagaaaagccgtcaagatggtcaagaagagggcgaacaacggtcgtaacaagaacggccgcggccacaccaagcccgtgcgctgctccaactgcgctcgctgcgtccccaaggacaaggccatcaagagattcactatccgcaacatggttgagtccgctgccatccgtgatatctctgacgcctccgtcttcaccgactatgccgtccccaagatgtacctcaagctgcagtactgcgtctcctgcgctatccacggcaagattgttcgtgtccgttccc

SEQ ID NO: 5438 - DNA, 459 bp, Aspergillus oryzae
tttaaggaatcgatccaactcacccaactatcgctagttcataattgatcgtccacatggcatccacagttgacatcgcttcctcgttcattgagggtgccccgccaggcgagctcgccgacgtcgttgccgatgtgaaaacgcttacctccaacggtgccgatatcatcccatcccttgctcccgcctttgagcgatacaatgagacgcaattggcgaccgtgaagctgcccggggcgagtcaggaggtggggtgatccttagaatcgcgtggagagtcaagttctgacaaggcaactgcaaaggtccttatcagcgaatacaacaaactggacggtaaccgctactttgacgtcgagagccagacgtcgtttgaagtcgatcatgtcacacaagtattgaccgctatatggtggggttttaggcggggactaggctgacattggcttcaggaagcct

SEQ ID NO: 5439 - DNA, 467 bp, Aspergillus oryzae
cattgacacggaggcacggaccgaatttcgcttgaggaaataccgactttgccaaattatcaacatgggagaaagcgcacaacgcccgtcttcggggccaggcccagttgggaagaacttttcatggattctgttaacggcacagtacactacgtttgtgctgttactacactactcacgggtaatgccgtcaactaatggcaagcgatatctcacgtctaccgcggtctttttcaacgaggttgtgaaacttgccatctctcttaccatagcattatacgaagtttccaaaacggcgcccccatcagttcctgcaacttctcttttcttctccctcacgtctgccgttttctccggtgacagttggaagctcgcaatccccgctgcctctatacacttgcaaactcgttacaatacgtcgctctttcgaatttacaggcggcacccttccaagtaacatatcagtt

SEQ ID NO: 5440 - DNA, 268 bp, Aspergillus oryzae
gcggcacgagggcgaaaccacagccaagggaacgggcttggcagaatcagcggggaaagaagaccctgttgagcttgactctagtttgacattgtgaaaagacatatggggtgtagaataggtgggagctccggcgccagtgaaataccactacctttatcgtttttttacttattcaatgaagcggaactgggcttcaccgcccatcttctggcgttaaggtccttcgcgggccgatccgggttgaagacattgtcaggtggggagt

SEQ ID NO: 5441 - DNA, 240 bp, Aspergillus oryzae
cggcggcaggccgctaggtggcgaggcctcttttggtgggttgggaatctgagctgtctgacactgctgtggaaggctgggcaggcgctcagtaactaggtagtctcgtgtttggaaaacaggtcattgcttctgcgttctcaatagacgctagcttcaacacgtcgcctaaatcctagaagcctgtaaataacagctaatctccataataaaacaactatgtcatgtatttaagtatcc

SEQ ID NO: 5442 - DNA, 271 bp, Aspergillus oryzae
tcagattacgcagtgaccgcttgatcctcgattgaagcggacccggtcccaatcccttatttatcgacccttattccgacgttctcctttcccgttccgcgcactccgcaccctccatcatcatggtccacaaagtcctcttctggggcggcttcggcatcgcagtccgtctctggcagctcggtatcgaaatgcgtcccattctcgccaaggaatctctctgggtgtaccctctctttgccggtgtcggtagcagcttcggatactggct

SEQ ID NO: 5443 - DNA, 378 bp, Aspergillus oryzae
cctcgtgccgaattcggcacgagggagagttctgcgctttgccttccaatacgctcgttccatcaacaagaagaaggtccgcgtcgtgcacaaggctaccatcatgaagatgtccgatggtctcttcttgaacctcgcccgtgatattgccaaggagttccccgatatcgaattcgacgcagagctgctggacaactcttgcctcaagatcgtcactgaccccacgccttacaacgacaaggttcttgtcatgcctaacctctacggtgacattctttccgacatgtgcgccggtctgatcggtggtcttggtctcactccctccggtaacatcggtaacgagtgctccattttcgaggctgtccacggctctgcccc

SEQ ID NO: 5444 - DNA, 198 bp, Aspergillus oryzae
cgttgacaagatcatcatcgaggctagccagcggaaccctgaaagtgtgaagacggccatcgtctgccctcctactatttacggccctggccgtggacctggtaaccagaagagcgttcaggcatactggctcgccgccgctgtgttgaagagaaagaagggattcttggtgggtgaaggaaagaacatttggcatca

SEQ ID NO: 5445 - DNA, 605 bp, Aspergillus oryzae
acgagaacccgccctaaaataagaggtaccagaaaaaataaaaagagtgacactgttagagaaaaggccggaaatgaagtcgcaaagagcagcattaagctctgagtcgcaaactcggcgaaaagcaggtgaggaaacaaaccggaaccagcaaagaaaagaaaagaaaaggctgccagatgagccttaatttaagcgaggcgtacccgcaccacgtgaccccacaaacccaccacccgcgcacaccgccttgaggcctcagtttcatcttctacacgatcttcaacttcgaataaatttcactctatcccgcgcagctcaacaccgtcgtcgacaactaatccgacaaaaccaccttcattcaaaatgggtcgtcttcactccaagggaaagggcattgcgtcctccgctctgccttactctcgctctgctccctcctggctcaagaccacccctgagcaggttgtcgaccagatctgcaagctcgccaagaagggtgctaccccctcccagattggtgttgtcctccgtgactcccacggtattgcccaggtcaagcacgtcaccggtaacaagatcctccgtatcttgaagtccagcggcct

SEQ ID NO: 5446 - DNA, 541 bp, Aspergillus oryzae
cggcacgaggctcaattctacgcaagcaaacacaatgcccgaaggtccagtagtaaatggcctcttccgccataacaacactacccctccagcgcaggagagtgttatggctctcttctcgctcaaggggaaaactgccgtcgtcaccggcgcagcatcgggtatcgggttgagcgtcgcacatgcactcgcggaggctggcgccaacgttgccatctggtataacagaaacagtaaagccgttgaggaggctgcaaacatcgagtctaaatatggcgttaagtgccgtgcataccaaataaacatccgcgaaagcgaaaaggttgaagagctgttgaatacatgcgtccgcgaattgaacggtcgcctggacattttcatcgccaactccgggattccgtggactcaaggacccatgatcgatgctccgcttgaccactacagagacgtgacacaaaccgatctagatggaacattctattgtgccagagccgctggcgctcattggagaaggcagaagaccgagggtacagatattttt

SEQ ID NO: 5447 - DNA, 375 bp, Aspergillus oryzae
cctcgtgccgaattcggcacgaggcggcacgaggctcaattgaccccagtctacatccattcgggaccattcaccatgtccgctccttctctctccagctacatcgtcaagcgcccttggctcaagcgctggatgatgcccattgccaattggtacaccgacgccgccggctacagaagactcggtttgaaggctgatgacctgatccccgaggagagcgaggttgtccagactgccatcaagcgccttccccctaaggaggcttatgaccgtgtcttccgtatccgcagggctttccagtgctccgtttcccacaccctccttcccgctaatgagcagaccaagcctgcagatgatgtcgaatacctgagcccc

SEQ ID NO: 5448 - DNA, 308 bp, Aspergillus oryzae
aaaaaggctgctggtcttcaaatgaacacggtcgaccctgaagaggtccgtggtcttcgaacagaagactttttctcacgtgctggaggtgttagaattattcccccgccggcacagctacaggcacccataaaggctagctcggagaaagattggagtacggaatctgaggcgacgtctgaagttgaaacacggtcatctgctgaaatggttgagccgcctgagtgaactgtctgaattcgtgaacttgccgtgtcagtcaccttgtctatgttacttgtatacagcacgaagggaatggcgttctg

SEQ ID NO: 5449 - DNA, 311 bp, Aspergillus oryzae
cctcgtgccgaattcggcacgaggcgagaacgagccccagactcccgccgaggaggccgagcctgctgagaaggccaagtcgtataacgactacctcgctgagaaggccgctgccggtgacttcagcgccaagcccgtccgtgccgccaacgagggcaccaaggctgactccaagtgggccaacgccaaggaattcaagcgtgaggaggacgagaactacatcaagggttcctctgaaaaggccaagcgtgagaaggctcgcaaggagaagaacatccttgaggtcgacatgcgctttgttgaggcccccc

SEQ ID NO: 5450 - DNA, 520 bp, Aspergillus oryzae
cgccgtcatggggccaaatgcccccacgccctcccatggaggcgcagcagttcggcaagggagctccgtccaactatcgcttccagtactccgcttgtacgggccgacggaaggccctgttgattgggattaactatgccgggcagccgaacgccctccgcggctgtatcaatgatgtgaccaacatgtcgaccttcctccatgaaagatacggctaccggagagaagacatggtcatcctgaccgacgaccaacagaaccccatgagtgtcccaacaaaagccaatatcctgcgagcgatgcaatggctggtcaaggatgcgcagcggaacgattcgcttttcattcatttctcaggacatggtggtcgaacacccgatctggatggagacgaggaggatggatacgatgacgttatctatccggtagactaccgtacggcaggacacattgtagacgatgacatgcacgctattatggtacgcccgctgcaaccgggtgttcgactgaccgctatttt

SEQ ID NO: 5451 - DNA, 409 bp, Aspergillus oryzae
ctctcttcgggggaaatagcaactggcgcggaccggtctggctgtgcgtcaatttcttgctggtcgagtcgttgctgcgcttctacatgttctacggcgataaattccaggttgaatgtcctacagggtccggagaatatatgcatctcgggcaggttgccgaggaaatccaacatcggttacagcatttgtttgcccgtaacgatgaaggacgtcgagcggtacacgacaactcggaccttctcgacttcagatgagcactggaaagattacatgtggttccacgaattctttgacggtgataccggacggggccttggagcatctcaccaatgcggctggactggtttgattgccaagatcatccatgacactggaatcaattgccgcattccgcaaaccccacgct

SEQ ID NO: 5452 - DNA, 532 bp, Aspergillus oryzae
aaacggctgctctttacaaaggaccaacggcccccatcacaagcatctgctttagccccgacggtcgattactcttcgccggttgctgggacaaatacgtctggtgctgggatgtggcttcgaaggaagtgaaacagaaatacgacggtcataccgactttgtaagagcggtggtcaccacccgactccagggcaaggatgttctcgtctctggcggggctgacgcgcagatcttggtgttcgacattgccagtggcgagcggctctccgtcatgaaggggcatgccaagggtatccaaggacttgttgtagatcccgtctctttagattctgacagccaagagctggttgttttcagctctggcagcgatcgggagattcgccgtttcgacatcgccagtggtagcaaagacctgacgggcacagacgccatcctagtccatgatacgaatgtgtacaagctcttctttgaccgggatgccgatttgtggactgcctccgcagacaaatccgcaaaatgtctcgtgagaga

SEQ ID NO: 5453 - DNA, 522 bp, Aspergillus oryzae
cctcgtgccgaattcggcacgagggattccgcaatgactgacgtcttcaagtccgatgcagagtatgaggctgagaaggcagcttctatccttgcagcaaagaaggagctttccgaacttatcgacccgaagcttcgctccgacgagggtactaacaagtcaggcctttacgagctacggggagtaatcacacatcaaggtgccagcgctgacagtggtcactacactgcatatgtcaagaaacaagcccaaggtaacaaggaagaggatggaaaatggtggtggtttaacgatgagaaagtgactgaagtggaagcggagaagattgagactctttctggcggcggcgagtcccattctgcgttgattctcctctatcgcgcgattgacctgcccactgcgaattaaggatgtccgcagcaacggcctaaaccttattaatcaacaggttgaatgatgataatacattatgtgcatatgtggaacacgagtgaccgtctgtatcagtggggaaaacagttt

SEQ ID NO: 5454 - DNA, 400 bp, Aspergillus oryzae
ggaccgtctagtcagtcctctttgcagggagatactcgagtctcccccagaggatcaactgagcggggatggaggaattgctacggagggagttactccgccgacggttgcagaagatgtggacatgaacccaccggcatacgatgagatatgggctgacaaaggcacatcaggctctgaaacaacacttccgaccggagtcgcatcactgaatccattgaaacgaaaagggttagatgatatagctggctcaactagctaagctgggtggcactctgtgcagtgacatctgaccctgatcccgtggttggtgcgcttatattcatgatgctgcctatgtcatcctttctatgctgtatagacgaggtttcccggttatccttagcgaaacatgttgttt

SEQ ID NO: 5455 - DNA, 465 bp, Aspergillus oryzae
gccaagcacaacctcgttatcgagttgatcgtcgctgaggaattctgtcctaaccgcaacaccaggctcatcacgcctacgggcgcagcacgtgtgctccgcatgcagttccacttgcatgtcactgaacgtagcggtctcggtatcagctgggacgaggaaatgcctccgatgtatgaggatgttcctgctagtccccccggctacacaaaccctgatgccagcagtgtcatggaagactaccacggttccccgctcccgcttccagagtacgaagatttggaacgcatggactcccttcgactggacagcgactctactcactcttcggctcgctcaattctctcaacacgcggacgatctcgattcaccacagacgatctcactgccgagcccatgacacaacaaaaccgcaatcgagccccgtccgccgattcgcaagtctctcgggcctccgagtaactt

SEQ ID NO: 5456 - DNA, 128 bp, Aspergillus oryzae
agcgtcttctgattgtattgcgacggcactcctcttgtgtatgaactctattgatgtatgtatattaaactaagtgggccgagacactcgatctatcggatcgggtaatataaatagaggcgctattg

SEQ ID NO: 5457 - DNA, 380 bp, Aspergillus oryzae
atgacagcaacaacagcaataactcgaatggtgccgcctctgcgaacgagcgggtcatgaagggttccttcttcgccgtcttggtcgctgtcgtcgtgctggtcactctgtgaaccagtcactattagggcccttgccttcattcttgaatattcttttctttcttttctttccttgggtatataacaacacttaccccccattccatgcccacgcggttttggtgtgttctgttaaatctaccttctatccatggcggtccctcactcttcatgtctgtcgccttataccagttaactattctattctgattggatgtctttgatgcttttaatgaccgcgcgtggcaatgccgcaaacggcgcattgcatgcccgttt

SEQ ID NO: 5458 - DNA, 373 bp, Aspergillus oryzae
agaagatgagaaacaaaagcaacgagaaaagactgctgacctcctcgaacgcgaagtatccggcatctccttgaataaatcctctaaagaagcgaaagacgaactggaatgcgatattatctcggtcaagatcgctgatctggggaacgcctgctgggttggccaccactttaccaacgacatccaaacacgacaatatcgctcgcccgaagtcattctcgggtccaagtggggtgcgagcacggatgtatggagtatggcgtgcatggtcttcgagctcatcacgggtgattacctcttcgatccacaatcgggtacgaaatacggcaaagacgacgaccatattgcacagatcatcgaactactgggcccc

SEQ ID NO: 5459 - DNA, 495 bp, Aspergillus oryzae
aggctataaaattggagataatgtattctgcggggattctttattccacgcggatatcggtactgcgcgttgcgacttccctggcggaagtgcacacagcctcttcaactccgggcgtaagcttcttagtttgccggaccacgtaaaaatctggacaggccatgattatccaccggagggtcgcgcaaccccgataccttggctgagtgtgcaagatcacaagagccaaaacaaacacctgagggacggtatcactgaggaggagtttgtgtctctgcggcaggagcgagacgcaaaattggcagagccaagattgctccaccagtctctccaaataaacatccgggcaggacaacttccgaagccaacggaagctgggcatcggatgcttcacgtgccgctaaaacttggagatgttaaaatggtaaaggtgactgtgtctgggaaatatgtctgaaagctgtagtaggatgatatgagtgcttcaaccagaaa

SEQ ID NO: 5460 - DNA, 359 bp, Aspergillus oryzae
cgacaacacgagcgccagcggccttacgaaaccgacaagatggtcctcgcaaagaagcacgtccccatcgtcaagaagcgcaccaagaccttcaagcgccaccagtcggaccgcttcaagtgtgtgcctgagtcatggcgcaagcctaagggtatcgactcccgcgtccgtagacgcttcaagtcgaacattcccatgccctccatcggctatggctccaacaagaagaccaagcacatgatgccctccggccacaaggctttcctcgtccagaaccccaaggacgttgagctccttctcatgcacaaccgcacctacgctgctgagatcggccacgccgtctcctcccgcaagcgcgt

SEQ ID NO: 5461 - DNA, 370 bp, Aspergillus oryzae
tcgcaaccaccaaaatgtcgtcaattgctgctatggcctcccgccaggcctttgctcgccagtctgttttccgtgcccccgcccgccgtttctacagctccaagttggaggaggctagcctcgacaaggctcctcgtcgtgaccctgagctttacgtcctgctcggtgtgatgtccggtgctttccttgctgctggatggtacttcggcaagaagcccacctccgtgacctccgagagcaacgtgcgcattggcgacagcgccatgccttgggagcgtgaggacgacggcaaggtctacaagtaccagtaccaccctcacggtgacaagagccagcctctcagaaacgcccccagcgctctgaacaccgg

SEQ ID NO: 5462 - DNA, 317 bp, Aspergillus oryzae
cgtcaacattcaacttgacacgcccttctcattatactggcggtttcctcgctctccctccaattcgccctccggcgaaccctatgcttcctcgcttgagccatatccatctcgcatttgaggctcttcccatctccaaccctgacatctatgctctcgcaaccctccagacactgctcggtggtggcggatcattctctgcaggcggtcccggcaagggtatgtactcacgcctttacacaaacgtgttgaaccagcatggatgggtcgagagctgtattgcttttaaccatagctacactgacagcggaatcttt

SEQ ID NO: 5463 - DNA, 359 bp, Aspergillus oryzae
gccatctgtgacggctgcgagaagaatgtcgtcggtgtgcgtcacaagtgcctcacctgccctgattgggattactgctccgagtgtttttcacatgcaccggatactcatcctggtcatcgatttgctccactttatgaggctatatctgagccgtctcaggatcatgaggtccactatggtatcttctgcgatggccctctttgcaagaataaggcagtccctggatatataactggggtccgttacaaatgctccgtatgctacgatctcgatttctgcgccagttgtgaggcgcttccgacaaatacgcataaccgaactcacccaatggtcatgctcaagactcctgttcgcaa

SEQ ID NO: 5464 - DNA, 534 bp, Aspergillus oryzae
cggcacgagggctatctatataatcaaataaaaatgggcggtgcaagcagagaaggtggcaaggtcaagcctttgaaggctgccaagaaggaaaagaaggagctcgatgaggatgacctcgcatttaaggaaaagcagagagctgaggccaaggccaagaaggagttgttggacaaggccaagggcaagggcccattgaacactggttctcagggcatcaagaagtcgggaaagaaataagtttctcttgaggacggcactacgctattttcacgatatacaacgagctacgagccatgagcacaaaggtggagggttgccatatgggcctcatcgctacttgcagtatctgaacaaactcatatattggttttctcaattcaatatacctctatcccaaaaaaaaaaaaaaaaagtcgtttgatatcgcgaaggattggtaaatctgacggttcctggatgaaccacgactctgtcatgaccagcattctttgaaaatttgcaagcgttgtacggaactgcattcttggaatt

SEQ ID NO: 5465 - DNA, 333 bp, Aspergillus oryzae
ggcatcccaagattacttccataatgaatcccgaagagaacgaagtcaaagatgagcgcttgcagcatcaagaagagggggtagacgatgaggaagagattgcggcgatgaagagacgggtagccgaaatggaatccgaggcagcgaagttgcgcgagatgcaagccacccttgatcaacagtccgagaacctgcgggaagataaggaagagatcgatgcgcggagtattttcgtcggcaacgttgattacggtgcttccccggaggagattcaggcgcatttccagagctgtggctcaataaatcgcgttactattctcctggataagtttt

SEQ ID NO: 5466 - DNA, 478 bp, Aspergillus oryzae
aacgacgacaacgacccatcctctcacctcgtcccctcttcagtacaccttcgattcccgctcgaggttcaaagtcgcaaaaatgggtggtgtcaccgttcgcgatgtggacgcgcagaagttcatctctgcttactctgcgttcttgaagcgtcagggaaagctccccatccctggatgggttgacactgtcaagacctcttgctccaacgagctccctccccagaacgctgactggtactacgtccgtgccgctgccgtcgctcgtcacatctacctccgcaagaccgttggtgttggccgcctccgcaaggtccacggctccgtcaagaaccgtggctcccgccccaaccaccacgtcgatgcctccggctccgtcgaccgcaaggtcatccagtcccttgagaagatcggtgtcctcgagcacgacgaggagaacggtggccgtcgcattacccagtccggccagcgtgatctt

SEQ ID NO: 5467 - DNA, 330 bp, Aspergillus oryzae
ctggaataattagcggccgcaggaatctactatctacttagtactacatcttacatattcccatctacaacattacctgatacttcacgatgggctgtgattgcggaaatacctgcggttgctccggtccccagagctgcacttgtggccagtcctgccagtgcaagaactgcggaaagtgatccattcgtccgcacttgattacatacgaggaatccgatgaagtttacgatgttgaatgaaggggatggaaatgatttggagtattgtctgggcgtgattttggactttattggatactacttaatacactctctttaaacggtctat

SEQ ID NO: 5468 - DNA, 339 bp, Aspergillus oryzae
gaagaattcgcggcccgcatggtcaacgcgcttggagaagataaagtcacaccggaggctagacttcgggaccaaattggaggcatattactctgtgccgctggttttgccatgttcggctggtttgtggatagggcaattcacccggcggcagtgctattttcaacattcttagtgggatttggaatgtcctggatcttcgtgacgactaatgccttccttactgaatgtatccgccagcaggctgcccaggcctttgcgttgggaaatatgcttcgaagccctgcggcggcagttactgcggccatcattcatccactgaccgtgaggatgggatgg

SEQ ID NO: 5469 - DNA, 435 bp, Aspergillus oryzae
cgcgcgtgagcctcgagcctcttgtgggtactaatacgcagtagtcagtagttcttgttatgagtcaattctgcaaactgtctttcattctcgcctaggtataaatgttgcaagttacacctaacccgccacgttgtcttgaacagagcaacctgtctctctttccgcacaaggagtatcgccgatattgcgtcagcttactctgatgtctcggcgtatggctcgtggtgctcggatgccagcaaatacgaccgttatgtcaagtgaataatgggtcattgcgtgccaaaccaattgagcctcgccaatccccggcctacccgctcaaggacgaatagaaactctctctctgggcatacagtttatcgccaggattgcagaagtttatcgggtatcggtctcaaatgatgctgtaaagaataaggatctggacag

SEQ ID NO: 5470 - DNA, 321 bp, Aspergillus oryzae
acctaggctgacttgggagtcagcctcattattaagtctataccaaggacttgtagggttctagcggatattgtatagagtttgacctcttcttctttctccacaagtcccaatcggtcagaaagtcccggacaccagctttgcgactcggctgtggatcatcatgcaggaccgtgatctgggacgtttgtgacacaagtcgcacaaatgacgctcatttgcgtggaggacatgttacaagacgcgagaagccgcagtggagtcgggacaagaggatcttccgaaatgtagactgccgaatcgaacacttctccgattgtg

SEQ ID NO: 5471 - DNA, 463 bp, Aspergillus oryzae
ctaaagaccctgtaccttgtttgctgcttcctccagcttaaagaatcgggtcaaaagttggaggtcaccatgggtctcgtctatccagctggtgctgctaccgtgtcactcctggtgatcgggggctatatgcttttccacggagatggcgaacaatttaatgttggtcaattcctcgaatcggtatctccatatgcttgggcaaacatcggtatcgcgatgtgcataggtttatcagtcgttggagcagcgtggggtatctttctcacaggttcatctattgtcggcggaggtgtcaaggcaccaagaatccggacgaagaacttgatctctattatcttctgcgaagtagtggctatttatggtgtcatcatggcaatagttttctcttcgaagctcaatctcgtcggcgatgatgaaatcttctccggcagcaaccaatataccggatacgcactctttt

SEQ ID NO: 5472 - DNA, 356 bp, Aspergillus oryzae
aacttcttcagcttccaactgacccttcacgatatcattcccttccactgtccaatatacccctcctcccatcttcacttcctacttgcataaaattcctgttgcacacctcactttcataatgcctgagctttccaaggtccaccctgaagtcacatgggcccagcgctcatctgccgacgaagctgagcgcaattacctttatgtgaacatcaaagctcctgatgtagatcgtaaagaagccaccctcaagattacccccaccaatgtcacattcgccggtgattccaagaagggtgttcgctatgaagtctccctggacttttacgctgagatcgaccccgagaactccaagg

SEQ ID NO: 5473 - DNA, 311 bp, Aspergillus oryzae
caattatgaagaaaaggaaaggggctgaaaagtccagtacagaacacttcaatccctgccagccgacctggccaatggcgtggtcagtccggtaggagagcatttctatccgcggatcttcagatgaacagcatcgaagcccttctgaactgccggtcgctggtaaacccgatcgtaccatattgtcagctccgggaacctctccaggtcgagaccagctgagcctgcggcagccacgtaggggaggtggacgaggtccgcacgagtgctgcacatggttagctacttatagacttaataccaaggggggt

SEQ ID NO: 5474 - DNA, 229 bp, Aspergillus oryzae
gacaaggtcggcgcttacctcattgttgatatggcccatatctccggattgatcgccgccggtgtcattccttctcccttcgagtacgccgatgttgtcactaccaccacccacaagtctcttcgtggcccccgtggtgccatgatcttcttccgcaagggtgtgcgcagcactgacaagaccggaaaggagattctttacgaccttgagggtcctatcaacttctccg

SEQ ID NO: 5475 - DNA, 492 bp, Aspergillus oryzae
cctcgtgccgaattcggcacgagggactaccgtgggaatacctgtagggtcactgttttccgcgaggtataagagaaaagcatcttactctgcaacatcatatcttactccggagtagaagcgcagaacgtcatcaagcagcaatggctcctattcacgaacgcatccgcgaggacctccttatcaaagagcgcagtctgtggaccgctctcacctccgctgatcctggccccgagatcgagaaactgtccaactccgaagccaatttcctgtttcccaaaacacccatcctgactcttgacggtgagccctctctacaacagacactcaagccttcattccatcatttcgattcgttcgaattaaaggacgtccgagtcatcatcattgatctcatggcgggaaccgttacctacaatatcaatgcctcgaaaggaaaggagcagtatcgggctacgggatcgacaacatggagtcaagcatccgatgggg

SEQ ID NO: 5476 - DNA, 540 bp, Aspergillus oryzae
cctcgtgccgaattcggcacgaggcgacagcactcaactccacgaccacccaacgacccttgcccgctgcgttcctggtgaagggctgcaggattagagtcccctcgaaacagcaaacatgggtatttctcgcgactcccgccacaagcgctcggctaccggtgctaagagggccacctaccgcaagaagagggcgttcgagaagggtcgccagcccttcaacacccgtatcggtaccaagagaatccacctggtccgcacccgtggtggtaaccgcaagttccgtgccctccgtctcgagtccggtaacttctcctggggttccgagggtatttcccgcaagacccgtgtcatcgttgtcgcctaccaccccttcaacaacgagctggtccgtaccaacaccctgaccaagtcggccgtcgtccagattgatgctgctcctttccgtcaatggtacgaggcccactacggccaagcccatcggccgcagacgccagcagaagaccgagaccactgaggagaagaagagcaacagcgttg

SEQ ID NO: 5477 - DNA, 256 bp, Aspergillus oryzae
ggttcattttgtttgttagtctgggaatcagataataagattcaaagttcaacgttggattctgtttgtctgctacacagattagcggcttggtcaggaacacgttggacattgttggtatgacttgtggcagtgaagggtaggacaagggctttggtctcttgtactctgtgttcgtgtttcaccaactaacagctttatgatggtttttcacctgcgcaagtgcttattttttgtgtcgtggagattgattgtt

SEQ ID NO: 5478 - DNA, 592 bp, Aspergillus oryzae
tccgaccataaatatacttaataaatcgtgacttctgagtgaggtcgcaaccctttcaccatggtccagatcagcgaagtgaagggcaattcgcgcgagaataggaccgccgcgcacacgcatatcaagggtctcggattacgttctgatggcactgcagaggcttccagtgatggatttgttggccaaactaccgcccgtgaggcatgcggtgttgtcgtcgatttgatcaaagcgaagaagatggctgggcgtgctgttctacttgccggtggaccgggaactggaaagacagcgctcgcccttgccgtatcacaggagctgggaaccaaggtcccattttgtccgatcgttggcagtgaagtctactctgctgaagttaagaaaacggaggcacttatggagaacttccggagagcgattggtctccgtgtccgtgaaacgaaagaagtgtacgaaggcgaagtcaccgagcttacgcctgaggaaactgaaaatccattgggaggctatggacgcacaatcagtcacttgattattggattgaagtctgcaaagggaaccaagaagctgcgccttgatcccagcattt

SEQ ID NO: 5479 - DNA, 195 bp, Aspergillus oryzae
gtggcggcattgcctcgaacgaagcaagagcgatcatagcggacgaccggatttcctgatggccattggggatggtcgagatgatgagccagttttccggtgggcgaacaaacttgagaacgccaagggagtcgactatgccatgacggtgacattaggatcccgcagcacggaagctaaagcaaccctaactca

SEQ ID NO: 5480 - DNA, 365 bp, Aspergillus oryzae
caggatttcagcagccagcctacagtcgggggcgctagatattcggcgcaaatgcgttagcttggaagtcagaccctacccgatgagtactaggttaacaggggggctagttgggcatgacgtgacatttcattcaaaaataggctcgaaaagctacgcgtgaagcgaataccgatgaaaactggtatgaaccagactcccaattttcataccgggggcataccggcctatcaataacttcgattccagtactggactcagagttagcggaacttacaacatatgtataatagaaccttccttttggtctctcttcaagtgttcatgggtgcacctttcattgggtgcagacattgcatgaaata

SEQ ID NO: 5481 - DNA, 154 bp, Aspergillus oryzae
cctcgtgccgaattcggcacgagggactgatactggccttgaggctacccctgtagctgctgacacgggcgacaacaatgtgattaccgaagagaccacggaaaatggtgctgagaatgtcactgtgtctaaatcgcaaggcggcgacggtttc

SEQ ID NO: 5482 - DNA, 155 bp, Aspergillus oryzae
ggtgaagaatgaaagagttaaaaacgctatgttgggggtaagttgctccctcgattcttaatttctcatgtgccgtgccatctccttaccccgaacctgcgcaaaatggcagggctacggatcttacagtaggatccgagagtttaactgtgagg

SEQ ID NO: 5483 - DNA, 456 bp, Aspergillus oryzae
ctacatggacccagtcagtttgctctgactggtaagcattagggcctcagcgtgttggatacactggaacatggcagttgacaggctgggatggggttgagtggcgtgagatagcggaagagtccgtcgtatgcgcgatcggcactttcgccaaaagcccctcgttaagcagacgcccagatggcagatgcaggcattagcaaatctgttggtaatgcgatgctgcagtagtccagagctctatttggtctgtgtgacggtatgcaagctgtgataggacggaactcggacaatttcttgcgaaggaaggtcttttcttagtaatggacagttcccaagtcaggtggtggtcagtgacttgcgatcgtctccggcgaggccgacaccactaatcgatcatcatgtatgtacgacgctcttatttgccttggtcaacatgacaaatttacgattcct

SEQ ID NO: 5484 - DNA, 323 bp, Aspergillus oryzae
ttaaaaagtgcctaagggacgatagttacgctaaagccgttagtaatctaccttggactccataattcgtgctggtgactccaatcgaccagtaacggaccttctcaatcaagataagtacaggaccacttcgttagcagcggatacatgatggctcacatcattggtcctacaaagggaaaaacgactcctcgagtctagactgggactgtggggagtttagaacaaacgaagaggggaataatggggaccccatgattctgatcccagtccgtttaatgagtacccaccgagaggatggataattaatcctattcatcctg

SEQ ID NO: 5485 - DNA, 326 bp, Aspergillus oryzae
ccggatcggctacttccatggaaatatcgtggagttagtcgatgacctaaagttgttgaagcccaccgggtttatgtcggttccccgtctttacagtcggtttgggaacgctattcgtgccttaactgtggaccaaccgggtttcaagggcgcgttgtcgagacatgtcgtttcgaccaagacagccaacctgaagaatcctgatacctctaaggctactgttaaacatgccttgtacgaccggatatggtctaagaaggtcgccgctgcctaggcctggaacgtcgagaatgatgggctccggctctgcgcccctcgatccttct

SEQ ID NO: 5486 - DNA, 214 bp, Aspergillus oryzae
gccggaggccgccgcgcggtccgagaaagatatcctggtggccagcaccggaatcatcgagaacgcaattggctacgctcgcgaactagagacgatcggttaatctaatagatctagtcacgaattttcctttggcttttcatcgggtccccgggggttatatcttggataccggcgccttgcataatgaattcatcgagcgtatcctttcatg

SEQ ID NO: 5487 - DNA, 302 bp, Aspergillus oryzae
tacggggaatggactttgctcctactgccagtactcggatggcgatacctttgctgctgaaagcttcaatggatattactctcataagtggagagcctatggcatcttttgggcgtttgtcatgtttaatttcgccgctggttacgctttctcgtggctttatctacatggcataagggatatcaagaagtggtttagtacaaggaaaaccaaaaggggggcacaggcgtagaatggttcagatctttctctttccttttcttatattcaaactttatgtatgtactatacggcatgattat

SEQ ID NO: 5488 - DNA, 385 bp, Aspergillus oryzae
cactgctgccagtcaatcccattcagtcttcaaaatggtcgtccgtattcgcctggcccgattcgggaacaagcaccagccattttacaacattgtcgttgcgcaggcacggagtgctcgtaactcgaaacccttggaggtcattggcacttacaaccccatcccgcaacgccctacaaacctctccgacgaggaagcccgcagcgcaaggccatacaaggaagtatcacttgaccggtcccgagccaagtactggatcggtgttggagcgcagcccagtgatggtgtgtggcggttactgagcctggctggcatcggcgatggcagaacaaagacaaagaactaagatctgttttgctcatacccgactctcttatattgattt

SEQ ID NO: 5489 - DNA, 141 bp, Aspergillus oryzae
cgacacgacaataccggccaccatgtcttccaaggtcaaggctggtcagctctggggaaagaacaaggatgatctcaccaagcagctggaggagctgaagcaggagctcagccagctccgcgtccagaagatcactggcgg

SEQ ID NO: 5490 - DNA, 302 bp, Aspergillus oryzae
gccgatcagttgaagaaaccagcgctcgtctggacaagttgcgccggtccaacaaggctctatcggaagaggctcgctttggtacaaatccccagtcatcgcgatcttccatcgactctgggtcccgcagggcactcacttctccggtgcccaaggaccgcagcccatcgattcggggaagcgaaacgcctacaggaggagcaaacgcgccggcgcctatcgattatctctatttgaaaaacgttctcctacagttcttggagcagaaagacaaaaattaccagaaacaacttatcccagtt

SEQ ID NO: 5491 - DNA, 325 bp, Aspergillus oryzae
aacaatcaaacacaagaacacaacagcaatcgactacagaccaaatacctctttccactactacttctatcaaaacaaacttgcctctggttactctcttaaacaacctaccttaacacacagccaaaatggctctcttcagaaccatgcctaccgctggagacttctcccctctcttccgtcttctggacgactatgacacccaccggcagagccgtggtcaggtgtccagcgtgcgctccttcgctcctcgcttcgacgtccgcgagaccgacgatgcctaccacttcgacggtgaactccctggcatctctcagaaggacat

SEQ ID NO: 5492 - DNA, 305 bp, Aspergillus oryzae
ccagcagtccctaatatctgctgaatcgctacacctccgcattctacatcgcctcggatcatcaatccctcacaatggccgccatcgcccccatcaccggcatgctccgccggaacctcgtcctggacctgagcaccgctttcggtaagccatgattcccgtgtcgggcaatgcaatagcattcagaaacgtcacccggtctaccggaacctcgaattcggatgcaaccacctccagcaatgcgcaattcatttcgaaaccatcatgtcgagagtacggatactaatgtttatatctccaggttt

SEQ ID NO: 5493 - DNA, 354 bp, Aspergillus oryzae
cgcctccgcggagacaaacaaggaagacggcgacacagcccccggcacccacatcatggtcgccggtatcgtcttccagctgttctcaatcaccgtctttgtcgcctgcgccgccgatttcgtccgccgcgtcctccgccgtcgtcttctgcagaacatgagcggatccatcacccccctgttcgccgccatggtcttctccgtgctctgcatctacgtccgaagcatctaccgtaccatcgagttgtcacagggttggtccggatatctgattacccgggagaagtacttcattgcgcttgatggtgcaatgatggtggctgctgttggcgtgttcaatatcttccatcccgg

SEQ ID NO: 5494 - DNA, 475 bp, Aspergillus oryzae
acatatgcctcatgaccctactgccggtacaattcgacgaaagcaaaaatacaccattaagaatgtcgaggcctggggtgaacgccacggacgacctgcagcacacgacccttctggacgcgcgttgtggaagcgaccatccgatggtagtttagtgtatctgacctgcccagtttccggctgtggaaaggccgactttgtgacgctccatggttttatgtgccatttgacaaagaagcataaagatcgcagtctgggtagtcaatcaagggcgttggaagtttgcgggatcgtctatgaccctaatgcaccccttccgccagtgtcgactgtacagcgtgcgtcgaccgaagaaagtcgcggtgactcggcccctacagaccctgaaggttacccacaagagatggactactcttccgcatcggatgatgaggagagccggaagaatcccgtgaagacagaggcggcagatcgg

SEQ ID NO: 5495 - DNA, 450 bp, Aspergillus oryzae
agctgtcactcctttctcacccccagtccgttctctagcatcaaacttgttttagtcagtcttttttgtacagcaccccgaacttgacagttcagttcaccgcccgtacccctaatcatccactttgttccgccataatgttgttcgccaagtctgctcttttcttgtcctttttggccctcggaaatattgccgccgctgcaggccctaaggcttgccttctcgaggctctcggcactgagccaagccccggtgatctcaaagccgtctgtgttgataaagtgcagaccaaaatcgagagcctgtgcagcgaagatgacaagcaagacgctctgaagcagttcgctgacacctgcaccgctgctggacacaaagtcgtcgtcaacacctcgacctcttcaagcgcctcttccaccggtacttccactgccggttccaagtcaagcagct

SEQ ID NO: 5496 - DNA, 308 bp, Aspergillus oryzae
caggaactggcccgcttcatgaaaattgtcgggcgattaaagtggaaattaccctttctggcggagggttaccgcctggctacgctacccgctgacagtggtgttgatgtcgcgcatgccgagatcatgtttaagattgatttcttcgagtactatgcgcttctggagcgggcaatcgtgcatttactcggcgttttcggcgtgacggtcactggtgctattactagatcgcaatcgactccgaggcttgggcgaaataggtccattgcggctatgcatcggtatcatgccaatgtcctggacacact

SEQ ID NO: 5497 - DNA, 407 bp, Aspergillus oryzae
cctcgtgccgaatcggcacgagggaatcacgcaagcggaaacggtctctcgaagaatgtcatgtccatcagtcgccttctgccgtagcggagaatactcccagagaagagtcacctcatacagggaacgatgactcgctggaactaactcaatcattggggtctttagaagcgttcaaccagactatggcgccgcctctgagcagcagccccctgtcaagtcccgttctcccagcctccatgtcagactcatcgcgactgttgaatcctactaaagaagacgcagaggtgcacccagacgtgactaatgaggcgactaccatctccacggcaattttacaagatcgattcctccctcggcgtcgccaacggtaccgcgaacgccgcaacgtggttgggttaaaattt

SEQ ID NO: 5498 - DNA, 309 bp, Aspergillus oryzae
gctttcctcaagatgaacgccgctaccggtctgcgggccagaatggccacctctttcgtcgcccgtcgtggcttttccaccacccgcgcccagctcggcagcccgtaccactacgctgagggccctcgctcgaacattcccttcaacccttttaccaagttcttctttttccgctactgggctttcatgatcaccggtttcggtgctcccttcgccattgctggctggcagacctacaagactcgctaagcgggttttcgcaatgtataccttctccgcgccatgggatcgttgggcactgggaattgg

SEQ ID NO: 5499 - DNA, 495 bp, Aspergillus oryzae
cggcacgagggaccaccacaccacctttatataccggcaacatgtcgaccgacccaaagatccaggacctgcttaacaagcccaagagtgagcttactgaatacgagggctccctcgtcgaggaacatgagctcacagctggcccctcttccttcttcaaaccggcacttgcacacacacccaggtcctgatcgcctgcgtagcaaccgtcgcctggtcgctcgcgtgaaggcgttcgatcgccactggaacatggtgttggagaacgtcaaggaaatgtggacagagaagcccaagggcggtaaaggcaagggtgtcaacaaggatcgcttcatcagcaagatgttcctgcgtggtgacttcgtcatcctcgttctgctcagttgatttcgggaattcattcttaaccacgtgacatgcgcgacatgtttggcttttctctatccagttattggagtcgacaaagacgggctatttcttgatatcgataccctg

SEQ ID NO: 5500 - DNA, 455 bp, Aspergillus oryzae
cctcgtgccgaattcggcacgaggcaggacaaattcaaacacccagaatgactgctaacatttttacctacagttcaaagaatcactttagagtagacgtcccacctctgaactcttctaaagagctacagaatctccacccttgctgatgacttccatgtcctcaatgccctaaagtgaagccgtgtttacttccgcctcgatagctggtatctgcgaacgacttgcttcggtgagcttgttcgagtgccttttgtccagggagtggtgatgatctttaccttggcttgacgtcttgacttcggtcggtcagatttggtgggtgttgaggaggtctgaaaggtgtttggttccgattttttttttttgactttgatgttggtgatataattgggacttggagtttatatgatacccagatttgctcaaatgaaaaactttttatcttctctaac

SEQ ID NO: 5501 - DNA, 293 bp, Aspergillus oryzae
cgtttttgttggattaggtagccatgagatggtcatttatcttttgtagtgcctgccggagagaagatcgtaaagaattgactggcctggagtgaagaggagtggccgttactggcgacgcagtagtgagacgtttctcttcgacagacgaaagatcgatgggattcgacgacgagctgcacgctaggcggagttcgtcaccttcaaatcaccagcctccatgattttttttcccaagtggagggagacaaatccccaaattaataagtctacactaaggaaaagatattatt

SEQ ID NO: 5502 - DNA, 376 bp, Aspergillus oryzae
caacccaacttctttctagtttttggatattccgattaccttttcaataaccaacaccatgtctttcctctttggcgggccccccaagatgtcctcggcagagaagattgctgccgcagagaccgaagttgagatgatttcagacatgttcaaccgtctgaccgagtcttgcaccaagaagtgcattcccaacgactaccgtgaaggcgacctgaacaagggcgagtctgtctgcctcgaccgctgcgtctccaagttcttcgaagtcaacatcaaggtcagcgagaagatgcagggcgaagccggcaacaagcagggcggtggtatgggattcggcatgtaaacggatgagaagtctgctggctcatgggcaaaa

SEQ ID NO: 5503 - DNA, 542 bp, Aspergillus oryzae
tctcgagcgcggaaatgggtggaagctgatggtctatggcatgtatgcgacattgctatgtctgacaacccgtatcgtctaccgccttatcgagtttgccaaccccaaccaggcgggtaagaccgtgctcagcaccaaagaggccccgttctacattctcgaatgtgtccccatcttcatcggcatgatgctctggaatgtcttgcacccgggtcggatgatgccgggtcccgacagcgagttccccaagctcttgcgcttcgagaagaagcagatgaaacaggaggcaaaagaggcgaagaagcaggaacgccgagtgggctttagtaaaaagtataccgctgtcaacgacttggaatacacttttacgcgttccagtgatgaggagcatgaggctggctacggcggtggacgctggcccctgaacgaggtggaatcgggaccaggaggttatggcggtcgtgagtatggctatgtccgttgaggatgggtaggatggggatgatactgtgtggaactgggaaaaggcttgacctggaagg

SEQ ID NO: 5504 - DNA, 308 bp, Aspergillus oryzae
aatatttaatttaccctccacaatggtcgcgataaccggtcccgacaactacggtgccgttattggcgtcgcgcttggagctatccctgtgctcagctttatccatggattagttgtgtcgggtttccgcaaggaagccaaagttccctacccttacacctatgcgactgtcgaacagtgcaagtcgaatgctaaagccgaacaattcaactgcgctcagcgcgcgcacgccaacttcctcgaaaatgcttcccagaccatactctatactctggttgcaggtctgaaatacccccagctggctaccg

SEQ ID NO: 5505 - DNA, 236 bp, Aspergillus oryzae
ccgcctggaatgagtccaaaactgtactagaatccgacgacaaaagccaatctgcagggcagggccaggcccatgatacggatgccgtcacccagctcaaattagcaacgagcgtggcggaagcaagagagattatcctccagcttttcaaggagaagctgcgcaggaagttgggactcttttctgatgtcccgcttagacgtgaaacgctcttacatgaaccaggaattgactca

SEQ ID NO: 5506 - DNA, 98 bp, Aspergillus oryzae
gcggtcgatgcaccatgacgttattcgaaaatgatgcggacataaatacgtctctggtcatcattctccacccaccatattaattatgtctcggagtc

SEQ ID NO: 5507 - DNA, 198 bp, Aspergillus oryzae
ctttgtcaacgattccgacgcctgcgctttcaccatccttcgataatatcgacttagttttggcaaatcttattttctgaatcacttcaaaaatggcacccaaggctgctgagaagaagcccagcactggcggcaaggcccctgctggcggcaaggcccctgctgagaagaaggaagctggcaagaagaccgcggctg

SEQ ID NO: 5508 - DNA, 219 bp, Aspergillus oryzae
cgagaagttcgtgaaagacaatgttcaggccgaagaggccaagggcgctcagaagcaggacaaagaagttgacgaacttgccgaggctttgggaaagactggtctgtaaacacgttctggcttgaccgattattcgcctacttccgtcattccccatatacaggatgcagcggcggtacctacttgcgcgcagtagctgcggtcatgtctaatgatgtg

SEQ ID NO: 5509 - DNA, 358 bp, Aspergillus oryzae
aaaactatccattggatcggaaaggaaaccatgtcgttcaaatccccgtccgacatcgaggtgaccactcgccaaatcccggaatggggagatattcccaacacatccatccagtctaagccggttctgatatatcggcacgcttttgatgcgtctccaagccagcttcaggcacgcttggaggagatcggcgaggtcgaaccacagtgggtttatactatgtatcagcagacgcactttcacagcacaacacatgaggttttgggagtggtctctggacgcgctcgtctctgctttggcggtgaagcaaacccccgtcgttttgagccgacggttgagaaaggcgatcttattatcg

SEQ ID NO: 5510 - DNA, 240 bp, Aspergillus oryzae
ggccgctgcgcccacgagttcatcctcgatgtccgcaagtttaaggagacctgcggcgttgaggccatcgatattgccaagcgtctccaggattatggcttccatgccccgaccatgtcctggcccgtgtccaacacccttatgatcgaacccaccgagtcggagagcaaggcggagctggatcgattttgcgatgctctgatctccattcggcaggagattgccgaggtggagagcggc

SEQ ID NO: 5511 - DNA, 232 bp, Aspergillus oryzae
cctcgtgccgaattcggcacgaggcccatacttgcccgatgagggcattgcacacctgatcgtccatatcaaacacgcttgcttcccgtgtgggtaggctgcaagttgtacccggccccgtaggatggcatgtcagacggaacggcggagctgcagacaggggctgggattcctgtagctaccaacgagggcttggattgcccaagtggttgctttgcggctcttttctact

SEQ ID NO: 5512 - DNA, 407 bp, Aspergillus oryzae
gttggtttcctgcagaactcaagtcgacgatcgagagtcggacatgtcccaggccttgtcgtggattagtttttcgcaaccagctatccgtggaataccgagtacataccaaccctatggccggggcaattattggcatagtgaacacaaccaggtattcctccaactgtcaagaaggctgttaatccacacatgacggcggtgtctagacagtgaaatccgtgtgagagaggaaggtagagaaagatgcacagtacagagagatgctaagaaggtcgtagttgtttatacatatatgtatgtcagatcttggatacctgttttaaacggtgataggacccaatcgctacatttgatggcaacagagggacaaatcatgaaaggtctcgcgtaatatcccacgccag

SEQ ID NO: 5513 - DNA, 425 bp, Aspergillus oryzae
ctctacttacccccacttttgaagttctaatatctctcttcaaacctcacattacatctacactttacttctatacatagaatacaatacaatacactacagccatcatgcctaagattaccgaaatcttctttgattgtgacaacaccttagtcctctctgaggagctggcctttgaggcatgcgccgaccttacaaatgagatcctggagagccgcggtatccctgatcgctacacaggggagcagctgattcaagacttcgtcggccagaacttccgtggaatgatggtctccctccaagccaagtacggattcgagatgccccaagaggaacttgaagcgttcgttaagaaggaggaggacaaagtcatcgctaagctggaagccaaagctcagccttgtgtcggtgccaacgaggaactt

SEQ ID NO: 5514 - DNA, 178 bp, Aspergillus oryzae
aaccatacagagattcttatagaccgcgaaagagaaatgaagtcccacgccctacttgccagctatggcctagccccttcacttttggctcgcttccagaatggcctgctctataggttcattcgtggacgccccggcactcatgaagatctagtgacagcttccatttggcgtggcg

SEQ ID NO: 5515 - DNA, 393 bp, Aspergillus oryzae
cgcttgttggcgctcttctcggaagatcacggcgaggtgatagcgagtcttctcagacctggacagcgggagtggatctgcaaccagttcctgcgtgtcgccacgttgctgcatcttccgttggaatcgggcaatggcatggagagctcagaatcgccgggagggtctgcggatgccaaggctgagtatctggccagggagattaggaagggggcaattcttatgagcgggccgtgaagcttggaatagtcagggcctttggtttcttttacaaagcctaaaactgcaccacggtccccagtgactaccatgaatcccgcgggggactactcttacatgattagattgcagcaacatcctcaatattcatagatatagtatattatctactgt

SEQ ID NO: 5516 - DNA, 179 bp, Aspergillus oryzae
cagaagttctcgaaccctctacgaagatgagagctaagtggagaaagaagcgcgttcgtcgtttgaagcgtaagcgcagaaagatgcgtgctcgcaggtgagttatctgagagctcagccctgctggacaattggactaacaacaagcgcagcaaataaatgactcgcccaatccatct

SEQ ID NO: 5517 - DNA, 207 bp, Aspergillus oryzae
aaaagggctggaaatgctgcaagccccgcgttctcaccttcgatgaattcctcgaaatcccaccctgtactaccggcaagcattcgactgtagacgataccccagtcgaacccccaaagaagacagacccagctgcacctgaaatagttgcaccccagccggtaactgcacctgtcgcagatagcggggtaccacggtcgacatact

SEQ ID NO: 5518 - DNA, 227 bp, Aspergillus oryzae
ggaaattctaccctcaaacaatttaccaagaattgatcctcctgagaaatactggccatcgccgtctttcccagtgaagctctcttgacaccgacacatactcgtgactatcgcaatggttcagttttcggaagagaccaaggagcgcatcttcaaagttattgatgtttcaagggtcgctattcactagcgtgcagcggatatctacccttgattggttatctcgg

SEQ ID NO: 5519 - DNA, 404 bp, Aspergillus oryzae
cggcacgaggcttggatgtctcgtgcccccttcgtttcttaaccgagccccgtcgatattggtataaatgggtgtctgtgcttcgtgtctgggggttggtcgccgggacagtcaggattctgagtcctcccaacgtctcctcgacgacgatatctaccagcctggttatggatatggcgcgctaaacaattccacccaaggcaatcaccccgataccggatacttgaagcgtgaacgagaagcgctcgaagctatctgccaacggacgtcagattccgttatcgatatctggtccctccagccccaacctcatctacaaccccgagcgactctccgcggtcccgtgtccccagcttcctctcgagccggcacaaaagatgatgttcccgtaaggataaccacca

SEQ ID NO: 5520 - DNA, 161 bp, Aspergillus oryzae
attgggggtgttttgaggtgatctttttctgttctactgtttgtggaggttaatgagctgggcaggcggtgctctgcttagtggaatgtgtttgattatatgactatctgtctattttattctatttggtatcctgaatgtgaggatattatgaattattc

SEQ ID NO: 5521 - DNA, 302 bp, Aspergillus oryzae
gctatcgtctatccactggaccttgtcaaaaccaaacttcaagtccaagtgaagaacgcacctgaatcgaaaagcggagatgtagtacattacgagtcgaccctagatgccatcaacaagattgtggagaaagagggaattgaaggtttatattccgggatggttggttctttgcttggcgtggcctcgaccaactttgcgtacttctactggtacagcgtggttagaagcctttatatggcatcgaagagcgtatctaagccacctggaaccgctatggagcttacccttggtgctgtgtc

SEQ ID NO: 5522 - DNA, 344 bp, Aspergillus oryzae
ccggcgcaagcgccccggaaagggtcggcatggtggcatcgctacctggaaatggccggccaggtgtttttctggtactggtatggctaccggacgctatacctgtcgatcccaacgtggtcatcccgcatcacgtttctgctcatctcgcatatggtcactgccccgttgcacgtccaactcaccctcagtcacttcgccatgtcgagcgccgatgtaggcgtccacgagtcatttgcacagaagatggtgcggacgacaatggacgtcgattgcccgtcctggttggactttatccatggcggtctcaatttccaagtcgtgcaccatttgttccctcgcct

SEQ ID NO: 5523 - DNA, 522 bp, Aspergillus oryzae
cctcgtgccgaattcggcacgaggatcagtgatagctgttgttagcgatggcgagacgtacacgccctttgtttcacaaagacgagatgtgctgcggacgggtgatgggcagattccgatgcaggactgatcgcaacggtaatagacatcggtattaccgcttctgtagtggatgcaaatggctttgtgcagatgattgggaaggatggcgacacaacaaccctcgttgtaggtgtggtgagcgtagtcggaaacaacatgagcggtcggtgaagcatttcacttatcgatgtcttcgggagcggtgcagataccggggataagaggggtctatacagctgggttgtgttgctgctattgggaagtggcatgagtgacgaggtggagaaagggttcccacggtatggaacaggatggtaggtatgccatacagtgattccatgtttttgcctgtgtgccattgcgcttgtcaatgctggggttggcttttatagcaagggaaacagaaggtggaggggaggg

SEQ ID NO: 5524 - DNA, 350 bp, Aspergillus oryzae
tctccgcacccacttcctcaccctcgacctcccgcctcagatccccgagtcgttgcgtcccgtcctccagaacagaagcatgcaggtgcgcaagctgaagatcctccccattgaggccatcgtccgcggttacatcaccggttccgcctggaacgagtacaagaaatccggcaccgtgcacgggatcaaggtcgccgagggtctgagggagagcgaggccttccctgatggtcctatttacactcccagtaccaaggcggagcagggcgagcatgatgagaacattcatccggatcaggctgtcgctattgttggtgaacgttatgcctctaagatcgcctctcttgcgg

SEQ ID NO: 5525 - DNA, 334 bp, Aspergillus oryzae
ggcgcctgaagacacgacgtgcgcgcgattggcccaaatgggttgtatcagcggttagtgggaagatgctaattgctgctgctcctggtaggctgatgttggggtactgtcgagtggtattctgtgggtggttatgaaacgtgactgcgatgggttgagggaggattgggagtatcgttttgtcgtttccaggtcagatatttattctcagggacgtgtactgtgtttggttccttcaacacggaaactggtatgcacagcattttgcggtactagctacctgtttactgtttttcttttttcttttcttttctttttttgggttgagatactt

SEQ ID NO: 5526 - DNA, 501 bp, Aspergillus oryzae
gagggaacaatgactcaccgcgcgcaacggagaaggtacggtggaccagatgggggacaaaggaataatttttcactcccacgggatcaatgtgcggcgaaggacaatagtcaggctcgggaggttcggcatctacaacgaacaatgccgtctaccatgctcgataactccgagctgcgtcctacccctcgatgaagctacatttattccatagctcgatggaaatctacgataccctgcatatgtgccattcactttgtattgcatatcttacaaggaactaagctgtttcctctttgtgtgttgtttccttcgcacggcatgtaggatcctgaatagagttccaggattccttttctttcatatgtttcactatgtctaattggttcttttccgctcaatacccactttatgtcgaaccattagcgattaagactcttttgtcatattagatccacgtaagcaacgtgcttacaatacaatatcgaactcattcaattg

SEQ ID NO: 5527 - DNA, 327 bp, Aspergillus oryzae
gatcgacaagtgtgtcggttctagaatttgggtcatcatgaagaatgacaaagaattcgctggtactttgctcggttttgatgactacgtcaacatggtcctggaagacgtgacagaattcgattactccggtgctcagattaagctccccaagatcttgctaaatggaaacaacgtctgcatgttgatccctggtggcgaaggaccggtcggtagctcttagtttctgatatccagtgctttttacttgctttgatgaaaaaaagattttgtgaatgatgatcaacgatatcttatagattctattgtaattgcaaaaattacatt

SEQ ID NO: 5528 - DNA, 416 bp, Aspergillus oryzae
agacaaacaaacaaatcacaactactctaccaattactactcctttaaccactttctaccttttaccaaaccactcgcaaacatgtctgacaccggacgcaaggacttcagcaccaaggccaaggaggagctcacccctgactccgccaagtccactcagcagaaggtgaaggagggcgccactgatattggtgaccgtgtctcccgtggcttccagcccgacgatcagaagtctggcacacaggaggccttcgacaaaggtcagcgtgtgcatgacaacaagagccacggcggtgccggcgagtcgatccttgacaaggccaagaacgccgtcggtctcggtgaccactaagctcaagtctgtggaggatcgcctgtgaccattcatcatgaatacttttatgatttgatgattt

SEQ ID NO: 5529 - DNA, 529 bp, Aspergillus oryzae
agtaatagggaaagtaattacaccatgcaatctgtcttgaagccaatcattggccctaaaaaggagattcacgacctctccggtcgagtcgctctgatcaccggaggggcgttgggtatcggctatgaagtcgcccgcgcattcgtgctcaacggagcgcgagtgatcatggtgaaccggaaagaagaacaaggccaagcagccatcgacaagatcaaggaggaagccggtgcggacgcaaagattgaatgggtaccatgcgacatgggaaacttggcacaaatcaaagaagtattcaccggtatccgtgagcgggaggagaggcttgacctgctcattctttctgctggaatcaacgccaaccagtacggcgagacgcatgataagattgatcgtcacttccaggtgaactggctgggccaattctacgtctgcaacttactcttcccactgatccggaagacatccaaattacccgatacgcctgctcctcgcattgtctgggagacatccgagcagcaccgtgccg

SEQ ID NO: 5530 - DNA, 336 bp, Aspergillus oryzae
gcgtctgacatcggggttggttactgcgcaggatcgcaactttaaattttctttctctggtcccggactataacacagtttctttgcttctacctgatgtctccgggctgatgtgacttgcatactttctattgttgacaggtcttggagtatcactgatatggaccctcaaccaatcactgttatttcctttgtcgggcatttgcagcagttccttttgtgatgtgattttctattttgccttgcatctttgcaatgatgagcgtgtttcttttcttaagatcgctgcatttagatgggcaggagtacgcatatatccctcatctggcatctatt

SEQ ID NO: 5531 - DNA, 107 bp, Aspergillus oryzae
cctcgtgccgaattcggcacgaggcccacaggctcaagcgagcgcagtggatgtatcaagggctgtcaaagaattgatgcaacgaggaaagttcacctggctacgcg

SEQ ID NO: 5532 - DNA, 403 bp, Aspergillus oryzae
ataaatggacaaacagcttcttgatcttatatttcgtatcacgtaccttaattctccgttttcgacatgttaaacaacctgtcttggttctgcgcttgacctccttcttgtgtctgccaccagagagcatcttgttcggatctcctggtagttgatatcgcatttgcgcactcgaattcattcccatttgcccaacgttgttcgggtatcccgtcatgtattggcctactgaagccattgggggcataggcgatccaatgggggcttgtgggacatgcgacgtctgtccctgggaagagtgatgatccattgtctgcatcgagggtgtgttcatcgatgcagagccagcttgatggttgtgatacatgtcggagctctgctgctgatattgctgtgactgggg

SEQ ID NO: 5533 - DNA, 543 bp, Aspergillus oryzae
cttggtcctcatctccacagcgacaatgaaactctcaattctgtccctggcgtctcttgcgcccctggtttccgctcatttcaagctgaactacccgactagccgtggattcgatgaggacaaaatgagtcagttcccctgcagtggcctgtctcaatcctcagaacggacgaaggtctctctttccgctggtgacttccctgttgccttgacaatgggccattcccagacagctgtggaagtgcttctcgctctcggaaacgaccctggcaccaatttcaacattactctccacccgaccttccgagtggagggtttgggcgccttttgccttcccaatgtcacttttgatgagtccatcgtcggcgtcaagttgacagatggaatgaacgcaaccctgcaggtacagagcaatggtgacccgagcggtggtctttacgcgtgtgctgatatccaattcacggatgtggactattccgcaccctcctcttgctcgaacaacactggtgtcaaggcgacttcattcaccggagacgccgcaaa

SEQ ID NO: 5534 - DNA, 337 bp, Aspergillus oryzae
caagtcgcaacccgccgttgagcgccggccatccaagaccccttcgaaggacggcgaggaagcatcatagattctctggcaatgataatgaaaattattccgtttcttctggaaagatttcccacttattcttctctttttgttgaaccttatgccatgttattcatgtcacatgctcattcctcctaatcttctcgtccatgatttcggtactcggttgcttatacactcttccgtttccatccgttgattggaagaggcaggcacttccgacgttataatgtacaatgaatgttgtgtttcaaaagcgaaatgccataatgaaggtggggctttt

SEQ ID NO: 5535 - DNA, 376 bp, Aspergillus oryzae
tcggctgatcgaagggggcaaggtgctggaggccgaactcgcgaacggccgcgggggatgggatcgagcctggatgaggttggatgagcggatctccaaccaagacggcaatcttgtcttcctggattagatccggcactgtccttctactcactatgattttcttgcgcttcttcttcccgcccttctctctcttagtcataacgagatagtttcagtctcaaaacagccagaatgaattataatttgacgaatagatattcactatgatcttgtatgccttttctgtttttgtttacggtcgaaacagatcctgtttttttagtgagtgcagatgcggtagaatagaagaaatatatatatattggaagtccct

SEQ ID NO: 5536 - DNA, 342 bp, Aspergillus oryzae
caagttcaaagatccattggagcacacaagatgaccaagttccgtccttgtatcgatttacactcgggtcaagttaaacagattgttggagggacactgagcaatatccctgcggacttaaagacgaactatgtttctaaacttccagctagtcattacgcagaactgtaccaaagacacgacttacgcggaggccatgtcgtgatgcttggttcaggcaacgatgcagcagcaaaagaagcacttagctcctggcccagtggcttgcaggtcgccggcggaatcaccgataagaatgctcagtattggatagaccagggtgccgagaaggtgggttctatt

SEQ ID NO: 5537 - DNA, 220 bp, Aspergillus oryzae
cattcatgtttgtctctgaaatcttaggatttcgaatgcttggttcttattctgccctaatctgcttcatgtacagtgaattcggtcatttgctattgcaggaccttgattctttccatacatcttatggtcatggtctttggcgaggccgttttgtgaaatagtgtttatacgattgtacatgataatagcacctaatacatcatacattcaccatgag

SEQ ID NO: 5538 - DNA, 518 bp, Aspergillus oryzae
cctcgtgccgaattcggcacgagggcgacgcaaacttcggtcgctgataggagttcccaaattgggaacctaacacataacgcacataagaaaataagagagagccatgtctgcgcagactactcttgctaataaaaaaataacttgagtgccaaaggaatatatatctgtgactggaagagccctgaaaaatctgattcattactggttcatctcctagtctaatatgaccacaccttcacgtgcaattctttttgatgctcactatcaggtaaagccaatcaatttcagcatgaacctcaagatggatgtcaagttcacagttcacgcttggaaataatgggccaaggtgggttaaaagtcacctctcagcggtagttgcgcagctgactgtgtatagagtgaagtagtgcccatattggcgatattctcaaatgcccgagagccgacttccacaccctggatatttctcagtcatcaagtctgcgatgaaatcggtcagcatcacatcactcccc

SEQ ID NO: 5539 - DNA, 448 bp, Aspergillus oryzae
gatggacaacatcccctttcccaccgtgccctatccacggatggagcctccggcccaccgcgagaagaagatgaaagtcctggcattaggcatgtcccgcactgggaccatgtctctttacgtcgcgctcaaggaactaggatacacgtgctaccacatggccgaatgtaatcttgatcagcagaataattcattatctctttggaaccgtgccattgacgcgatattcaacggaatcggtcgcaaattcgcaggtgccgactttgaccagatgctttggcgctatgatgtggcttcttacctcggcccgatgcacgtattattctgaccacccgccccgttgagccatggttggcctccatgcagcgcaccttctatgccattctgagttggaaacggtggggaattttggagttcattgatcctgtactggcgcccgccctcattt

SEQ ID NO: 5540 - DNA, 463 bp, Aspergillus oryzae
ctacaccaacaagatcaacaatattaaaaaacatcaaaagcaacaaacatcatatccccctcctacccacaacacccgcatctgattcccgatcctaatccctaaccccaggagctctggaccttctgtgtcacgatctagacacatcgacgacctgggaaaagtgggtcttgccggtgtagtgcatatcttctggagttctagatagtcggttttcttttcttttggtgtgatgtgaacaataaattaaaacatattgtagttgttagggtgttgtcggtgttctagatcttgcataactgctggtttatgctttctcgggcttcttaggtggtggtggtggtattaatgggttcttgtgatggcctattgcgggctgtagatatatatttcgggatagttgctcttgtccacatgttaccgaattgacggtctagaatatacccacggaaatgaagcgttt

SEQ ID NO: 5541 - DNA, 506 bp, Aspergillus oryzae
cggcacgaggggcacaactgcaaataatgacggcttagctttccaagtattgctggtagtgtgtttaactgtatacgtcgtgactgctatatggttactcctaagatcatattgtctcgcatattcgagtctagcctccggagcaactgatcctgcaatagcaaatgtatctccccaggacagcatggagagaagattggactgtctagaaagagttgcgccgaccaagcccttcaaaatctggtggttgtctattcaaacgatacgatccccgctaaaacaatccgatcatatattcacatgttctatctgtcttgataaggtccgcaagaaggaccccatccacaccctttaatgccaccacgtgtttcacagagagtgcctatagaattggtcttgggatttcataatcagtgtcccatgtgtaaaaagcccttctttgaagagctcgatatgagcccggaatgtgcagtgtaggtcaactcggaagttagggatcattcaaa

SEQ ID NO: 5542 - DNA, 518 bp, Aspergillus oryzae
gcagggtgagcctgaagacaaggaacttgagccggcctatgaccgcacggaagcgcctggtgttgaggtttccgatagtagtgacgatgaaagcggctcgcatgttggcgagctgccgccggtgcaacaagttcgcactaaatcatcggttcgaaccgccggttctgcacgtcagtcgatctatgacgggaacccgtacgatattgaccgcgttcatactcgcgagtccttcaaatgatcgaagaattattgcgcagccacccttcaagttcttcactttcccggcattttaaacataccgataccgactatgtcgataatttttagtatctattaccctatttatccttatacccttttgttgataacactctacgtgttgatgtgagatgtgcctgatggaagagaaaaaaagttttgtgtccatgtattgagcccttttttcagggctctactcttattatttagacgactggttcatgttgatatacccggcgtgtcattgcatattttcctgg

SEQ ID NO: 5543 - DNA, 423 bp, Aspergillus oryzae
cgccaaggtgccatcgccaatatcaaaagccgacgttgatagcagggcagaaagggagcgaaaagcagcagaggaagaagagaaaaatcgacgtaaagctgaattacatcgcttgaagatggaggatgccgccaaggaagctttacaagcaaagcgctcgggtggcagagccttaggatccgtagagaagactgcttccgagaaaagggaggaagaaatgcgtggcatgacgccagaaatgaggatgcgattggaaagagaacgccgggcacgggcagctgaagaacgtatcaagcggatgcaagggaagtagcgagcacttaccagctgcaattgatagacagaataagccgggccttgttcttcgatcacgatgcgcaagacaaaaggtatgccgatttcttacgaatgatagaaacgaat

SEQ ID NO: 5544 - DNA, 392 bp, Aspergillus oryzae
ctcactctcgcttttattgagcctcacagttgatcacccaagatggcctggtcgatagcacttccccgagaggtcttcacctctccaatcctttccgtcacaacgcctaccacggtcggcatgttggtcggctatctggtcaatcgcgcgggaggaaccaaacaaacctacaaatcactccaaaagccggccttctacccgccggcatggctcttcgccccaatgtggactgtcctctacggggtcatgggatatgccgctcaccacgcgacagtggccggatatagcgccctgacttcctccaccgctgcacagagcttgggtacgaattgggaaacgctgtatacaacacagctagcactcaactacctctggatgcccctcttcttcgg

SEQ ID NO: 5545 - DNA, 292 bp, Aspergillus oryzae
ggcttgcgaagtcgagatctggagtaccaaaagacgttgagagacatgctggttgattatgccctgccaaagttctgcgacaggtcgttcaaggtgcatattgagaaggtattccagtttgaggatattgtcgaagcacatcagctgttggaaaagaaccaaaccaagggcaaaataatctgtatgatagggtcccaatgaatagttcggtcggtcctctggtcttgtctatattgtcaacagacctagagcgatcatcagaattagcaatatcatcgcacatagacataag

SEQ ID NO: 5546 - DNA, 397 bp, Aspergillus oryzae
ctcatacttcgcctgcgcctcgtcatccgtgcgcccgatgatcggcgtaaatgtcgcgaagaacttaatcgaccgcggatcccgcccttgctccgccgccagcttccgtatattctcgatcttcggccgcagcaccgccggcgaatgactcgacacgaagatcgcctcggcatgcgtcgccgcgaacgctgaccccgctgccgatgtcccggcctggaagagaaaaggcgtgcgttgcggcgacggatcgacgatgtggcgtgtgttcagggagaaatactttcccttgtggttgatctgacggaccttggccgggtcaacgtaggtatctgtttcgggatcgggggatagagcatcggaggcccaggatccttccagagtctggcttcttagcttt

SEQ ID NO: 5547 - DNA, 446 bp, Aspergillus oryzae
gcaatcttggacgatctggatgaggacgaaaataaagacaagcgtttcaccaaaaggcgattcgatcaatatgtcgagaaaccaggtgaacttagtgatagcgaagacgaagaagagaacgctgccaacggagtccgccgccaacctggcataatgaaacggaggaaccaagtcaactatcgcaaccttgatgttgaatctggacttgagagcggaatggctacccccgccgatgcttcttcggtacctgacgatgacatggatactaccgccgacgcgaagatgggcgatgccccacagactgaaaccgaggcacccgcaacaccttccgtcgccgagccaccatcaagggctgaggaggcatccgcagcagtaccaacggaaatggcgattgatggtcaagagcaagcagctccctctgcgcctatttctcgccagccgtcccc

SEQ ID NO: 5548 - DNA, 437 bp, Aspergillus oryzae
ctcccggtagcctgatcagtgccaaccctggaccgggtcagcagcgaaggttcgtcacaggcggaagcgataatctgctcaagatttgggattacaactcggaaactaagtcctataatctctcccagacacttgaaggccactccgattgggtccgagacgttgcttggtcgccgagcatcctttccaagtcctacatcgcgtctgcctcccaagataaaactgttcgcatctggacctcggatgtgtcgaatcctggtcagtgggccagccagcagctcgaatttgatactgtgctctggagggtcagttggagcccgagcggaaacatcctcgctgtgagtggaggagacaataaagtcagcttgtggaaggagaatctcaagggacaatgggagaaggtgaaggatattgaggagtaattttcatgcatcccc

SEQ ID NO: 5549 - DNA, 395 bp, Aspergillus oryzae
cctcgtgccgaattcggcacgaggtaatctgtggattaccttcttccatctcagaagatatcaatcacttccatacttctacctccacactcctcaaaaaaccatctacattctatacacaactccttcaaaatgcagttgactcttctcaccaccctgctcgtcgccacctccgccctggctgctccccagatcgacaacctcgtctcccaggcggaaggtatcgcccagaccgctgtgaacggcggccagagcatcgcctccgacattgccagcgctgccacctccatcgcttccgccgctgagaccggtgtccccggcgctgcctcatccatcacctctgccgcgggcgccgccgcctccagcgcagagagctggggctcctccgtcgcttt

SEQ ID NO: 5550 - DNA, 340 bp, Aspergillus oryzae
ttagcatacagatccgtcggttaattcagaatggcactcttggtgaggtactgcgtgtgctggccgataatagcttcggagatgacatggaggaaaaatggggtatcaagcatcggatggttaataaggatctggctggcggggcgttgcttgatttgggtatttactccttgacctgggtgtttcaggctctatatcacactcttcctcgcgagtcgcgcagggcaccctcacgaatctcatcgcatatgtccctttaccacctcactggtgctgatgaggcaacctccattctccttacctttcccaccagcactccgtccaaccttcctcacctggg

SEQ ID NO: 5551 - DNA, 341 bp, Aspergillus oryzae
gttagcaaggctcgctggcccgagaagtccgccaagttcctcatcgacctcctgaagaacgctgaggccaacgccgacaccaagggtcttgacactggcaacctcgttgtcaagcacatccaggtcaaccaggcccccaagggccgcagacgcacctaccgtgctcacggtcgtatcaacccctacatgaccaacccttgccacatcgagcttatccttactgagggtgaggaggttgtccagaagggtcccgttgccaaggaggctcacctctcctcccgtcagcgtggcctccaggtccgccgtgccatccaggcataagcggttcatgggtgtcgggg

SEQ ID NO: 5552 - DNA, 463 bp, Aspergillus oryzae
cgggctcacggccgcccccagcaccagctgctactaaatcgaagcctactataccctcgaaacggccaagtgaagctacttcgtcccagatcaaaccagagccaaagaaggaagaaactgcggcatccgagcaagcgtccacacgggaaagtacaccctcgacagcatccaaacctactgaaaaggccgctccgttgaagcgagaaaagagcaacctcttcagctcctttgcaaaggcaaagccgaagcagaagaaggaagaatcggcaacgccggcagaatcggccgagcctagtggtgccgaggatgttttcggtgatgacgatgatgccgacgaagaaccggaagagctctttcccgacagtggaaagtctgcctcctcgccgctgcaacttgcgaaagtcggaaggaacgcgaagagaagctgaagcaaatgatggaggatgatgatgaagatgaagac

SEQ ID NO: 5553 - DNA, 526 bp, Aspergillus oryzae
cctcgtgccgaattcggcacgaggggagaagtgtatgatggtcaagcatttcttgaaggccaccctggcggagcgcagagtattatctcctctgctggtctggatgtctctgaggaattccttgctattcatagcgagacggcaaaggcgatgatgcctgagtaccatattggaacgatggatccggaaggtttaaaaacactcaaggatgatgcatcatcctccaccgatgaaattcgcccagtgttcctccaatcacggtcttggacaaaggcaacattgaaagaaaggaaagacatatcctgggatacacgaatatttagtttcaaattggaacacgaagatcaaacattgggtttaccagtcggccagcatcttatgatcaaagtcctcgacacatcatccaacaacgaagccatcattccgctcatacaccccaatttctgaaaccagccataaagggaccgtggacttgctggttaaagtatacttttgcaacagccacctcggcaggcggcaagatgac

SEQ ID NO: 5554 - DNA, 490 bp, Aspergillus oryzae
catcgttatatcgattatcctatcagcgaagttctgcaaatgttcggtaaggcctctcgtcctggcgaagacaagatcgggcgaggcgtgctcatggttccgtccgtcaaacgcgaatactacaagaagttccttaacgaggcgcttctgtagagagccatttgcaggcttacttgcatgatgctttcgtgactgaaatcagcactaaagttgttgcctctacccaggatgccgtcgattggatgacgcacacatacttctaccgtcgtctcctggctaaccccagcttctacggtctcactgatgtcagctacgagggcctcagcaccttcttgtcggagcttgtagagaacactttgaaagaactctctgaagccaagatcattgatttggatgaagaagacgatagtgtttcacctctcaatgccgccatgattgcagcttactataacatctctttcatcaccatgcagaccttcctcctttcttt

SEQ ID NO: 5555 - DNA, 350 bp, Aspergillus oryzae
gacgctactcaatttctttttagaaccgaggtcgtcagtcagttctcaattatggctgctcatctcttgtcttggtcatctccattgcgcaccttcgggtcgactatgagctccatggttgcaggtcggtcgaattcgactctcgccacagatgccgctgcttatcagcgtgctgccagcgctaatcaaaggccaagagtattcagccgccgtcgtgtaccaaaccgccaaaagttcatcgaagaccaaaagacccaaggagagagtcgaatcttagagaaataccaaactcgtgattggcgagcaggcgatatctacacacctcatgatctcagtgctgccgagatgaa

SEQ ID NO: 5556 - DNA, 264 bp, Aspergillus oryzae
cggcacgaggcggcacgagggcggaaccgaccgacagtgaagttgatgcgggcaagggtgaggaagaagatgtggatgttaagagcgaagatgagtctaaaaagtccgaggacaaggtgtcatcaacagccggaatacccgagttctggctttctgctatgaaaaatcaaatttctctggcagagatggtgactgaacgagatgaagaggctctcagacatctcaccgatatccgaatggagtaccttgatcgtcccgggattt

SEQ ID NO: 5557 - DNA, 229 bp, Aspergillus oryzae
cgatattcggcctctgtcgcaggcgattcaggcgtatgacgatttcaaccagatgaaatcgcagaagatcatatttgaagcgggcaagtagatctcagaaagtcaagccctagacggctatgggcaacgttgtttggcttaatggccaatatgcgaaggaagatatcctgcttatgtttacaaaatgattactatattagcgcaaggaacttaacaattgaccaagaac

SEQ ID NO: 5558 - DNA, 170 bp, Aspergillus oryzae
ggctggtcatgagaatattgagaagatgaaggaacgggtggagttgtttaaggctaccgttggacaatgatttggtgttttgttggatgtgtatagtgactatatatgttgtgttcagagcgtcaagtcatgtatataacgcattgattgcttgttgtttacatatggtg

SEQ ID NO: 5559 - DNA, 396 bp, Aspergillus oryzae
atcggcacctcctccccctccgtctccgcccaaatcgccgacgtccaacgcctaatcgagaaatccggtctcaagtacgtgatgcacagcgccggcacaaccctcgaggggccctgggacaaagttcatcaggttattggacaggcgcatacggttctgcatcagcaggggattgtgcgcatccagacggatgtgagggttgggtcgaggaccgataaggaacagtcgttcgaggataaggtgaataaggtacggcagttgttggggaaggagtaagtggttttgcgacgatttctttctccgctgtattatttatctagtgcaatcgttggaggggaatgtttgttcgggtatattccatttctaggtaatatctcacggttgctacgtacacgg

SEQ ID NO: 5560 - DNA, 389 bp, Aspergillus oryzae
ccactgcgctaaggccgtggggccacactttaagaagcggggcaagggcagtctggtcatcacggccagtatgtccggtcacattgccaacttcccgcaggagcagacctcctacaatgtggctaaggctgggtgtatccacatggcacgttcgctggcgaatgagtggagagactttgctcgtgtgaacagtatctcgcctggttatatcgatacgggattgtcggatttcgtggaccagaagattcaggatctctggttgagtatgattcccatgggtcggaatggtgatgcaaaggagttgaagggtgcttatgtgtacctgtgcagtgatgccagttcgtacatgactggtagtgatctccgtattgatggtggttactgtgtgc

SEQ ID NO: 5561 - DNA, 289 bp, Aspergillus oryzae
cctcgtgccgggagcggccttccggtgaagatcagggaaccagtactccccggctatgatctgagttattctgtaaagggacaggagtgtccggtacctagtactcggtgggtggtattaataaattcaaaaaggggccagggatagacttgggtggatgtttagagtgtatattatagcgttgatgtctttgttatagatcatggcattccgcataatcatgctagtatcgtggtttgcacactagttcttttttattttcatgagatatgccaatatttggtcgatc

SEQ ID NO: 5562 - DNA, 401 bp, Aspergillus oryzae
gtcgaagattttggtgatagtattcctgctacgagcatcgtgaccacccagcctgagtctgctgtatcgacccccgcctcagaaccttcggtaccaaagcagagtactatcaagatccagaacccgcccgcaaaagaatctcagaaagacgactccatcacggtcgctctgcgccaggctggtgaggaggccgccgccaaagccaaagaaagcaaggccgagaaggcaactccagctgctgagcagaagcagcccctccctccagccgtcgaagagaaaaaggaaggaggcgcagacagtgtacgtcggaaatcatcggttgctcccgagatcgttgagggggccaacccaaagcggcacctctggtgccagaggttgccgcggtgtcctctgccaatttt

SEQ ID NO: 5563 - DNA, 445 bp, Aspergillus oryzae
cctcgtgccgaattcggcacgaggatcttgctcacactctcactcgcacacactcctacctaacaccacatccacccatcaaaatgttcggattctcttggttcaagtcttccaaggaggaggaaacctcccagcagcctacctggaaccccaacaccctcaccatggagcagcctactagccctgcggctcccaaccagcagcaggtcgttactgagcaacctgccagccaggaacagatgaacatgagcctccgtggtggtggtggcggtggcgtctgctgtggaatttgcgccggtctggcttgcttcgagtgctgtgagatctgctgctaaagtgtcgcacggaccccatcttggacatcacctgcgggccgtcatgatgtctacgtgaccgactctcgtgtcaatgttaaagatacccagagttctagactcgctatgtt

SEQ ID NO: 5564 - DNA, 455 bp, Aspergillus oryzae
acttaattcttcttcttctatcaatcaatcaatctccactcctccatttttatttcccagagttgaaattgatcctctggtgcgactttacatcgctaatctaaaactccggttgagagcctacctatctccacttctccgcctttccggcattcgtctctcccttccccatcttcttctctcctcactttcacgatgtcttcccgtgtcggtcttcgtttcttccagaactcccgcgctgcttttcgcaatgcgcagcatcgctttggcgccggacgccgcttccagacctcggatgccgccgccgccgagccacagagcgttttccagcgtttgtggaacaagccccgttggtgttaagacggtgcatttctgggcccctgtcatgaagtgggctctggtcatcgccggtatctccgatcttagcgccccgccgagaagctgtctttgactca

SEQ ID NO: 5565 - DNA, 451 bp, Aspergillus oryzae
cctgaagaggtcaacagtaagcctcctattcgagcagaagaggcagttccacagcacccgacctaccggccatccaaacggtagagaaaatgtcgacagtgtagcaaggcttatggcatcggaaccaccaagcggacgccttgctcatggagatgtttttagtgctggtatttctacatactccttattccaatatcttgaaggcttgccaagtgaggccgctcgacacgagctgggaactggtccagaagaccaaggctcgaccctctttcttcaacttttctttaaccgtttgtcgaccctgtctgcagaggaatcaactgtagcccgggtcaaactcctatgcatggctatttcccgacaacacccggcctacagtaaagaagggttatggactgcgttcatgagatgcactgcttcagggtatcatgtctctgacgatcttagcttt

SEQ ID NO: 5566 - DNA, 134 bp, Aspergillus oryzae
cacaacccgtgaggctaagcatcggctagtactgttcacgccatagccccttggcgagtcgacggatctttgatatccggctaaggacgatcatctacatcttaccacttcgggatctatggtatttcctttat

SEQ ID NO: 5567 - DNA, 164 bp, Aspergillus oryzae
cctcgtgccgaatagtgcgagctatatatttacatgacttttttgtcgatttctttggtgtttattttgcctgggtgtcatgttcatataaaccatactcgcactggcggttttcgagaatatatttattggtgctgctgcatggtacagagggtgcgtcaaag

SEQ ID NO: 5568 - DNA, 361 bp, Aspergillus oryzae
cggcacgaggcgagcaaaacaaacgagtcaaccggggctttcaaatcggcccagacgacatagaagggacacaaaccggcgagtcctcaggcggcgcacgaaacaaacaatcaatcgagaaagaaggagacaaagaaccgtcagacttcgacctagcccagcgtctcgcgtttgctatacgtcggacgacccgggatgccgtcaatggacatccgaagcgctacaactacgacgaatgggtggagtttacccggatgattcgattcacggatccgaatgcgggggatacggtgttgtatgaggatgaatatgggattctgaattgggattggatgggtgagaatagtcccatgttggcttc

SEQ ID NO: 5569 - DNA, 285 bp, Aspergillus oryzae
acgcgatcaatgtcaatgaaaacgggcttgtagttccgcctcagagccctatgacagtcgagagcgatcgcaagggccgtgttgtcagtaactctggagctgatatcggtcctaatgtaagtggtggatcagctctatcatatggtaactacattgcggggcttggagttggaagaagacgtgatgtcagtggaaaggttgcggaggaaggtcgaggtggcatgaacaaggccacagacgagaagcaaaccatacgagctgctggatgggcacgtttttgctggg

SEQ ID NO: 5570 - DNA, 390 bp, Aspergillus oryzae
cggcacgagggaaccacgggatgggaaggagagagagagagaaagaaaaacgcgtgaaaaagaggctgacgggaagcagatgatttgcctggacgtttcggagcttcttttctggatgcgatgcggagaaggatttgctcgcctcgttaccgttccatacacaaccggtcggccattttacctgcaatgtgcaggtgctgcataccataccttactgtactgctagtcttctccaccgactccagatcgaccagcaaggatgctgccattattggacgattggcctatcgctccgggcaaccaccctgtgggaccctgaccttcaacgatcccccgattggctcatttctcaagccccgtccgcgcgtccggtcgttccaggaaccctgt

SEQ ID NO: 5571 - DNA, 155 bp, Aspergillus oryzae
ggcatgactgacgacagatatcctgtatttgataggttttgcttttttatttattgatttctttcccctccgttttgatctggacgcccggcatgttaagttacagaatacccatgaacacttaaggatctcatgcatttacctagaatttccag

SEQ ID NO: 5572 - DNA, 571 bp, Aspergillus oryzae
aaaacatcaccatgaagctctcaatcccccttctctctctcctggccacgagtcaagttactttggcggcacctgctgctacggtggatgttgctgaacttccttcagatactatccttgacatccggtcttctaatccgtctgacgaagccctggcggttctggagcagagggctactagagtctgtgagatactcgaccgaacagttcgtaccattggtactagcaaattcacggttgtctatatcgtaatgggctcgcgtcttgctcgacaagtctgtgaatatgccggtggcagtagatgtgaggaactatcttatattatttcagatggtctactcttggcctacaccgctgccgcccactactctggatctattcctgaaggtctaccgggcaagcgtgacgtcgatgattctcaggactatctccagatgtgggagactatgctgtccagtagtgatgatatatcctacgaaagcctctctcctctctcgatttcctcggatactattgccttagctagacgtcaggacgagcctttaccaacccacagattccagattactgg

SEQ ID NO: 5573 - DNA, 484 bp, Aspergillus oryzae
cggcacgagggcgaaaagacatcacaaatacactgtcgagcttggcgcagcggatgggtaaacatgagattacggacttggagatgatacggtgggcaaatgacatgtcccgcagaggcggcaggacttcgtcgatacgcagttttaaggatcagtcaatcggctcgggaatctttctccttgacgtgcttaacggcatgaagagtagctacgtggactatgaaattgtaactccaggccgcagtgacgaagaagcatactcaaacgccaagttgagcatcagtatagcgagaaagctaggtgcaacgatctggttggttcctgaagatatttgccaggtccgctctcgcttagtgactacatttattggctcccttatggctacatatgagaagatgcaatgagtaagctcattatgagagttgtattgtgctaggatggggagccgtgttaccctattctattctcggccatttccagtttt

SEQ ID NO: 5574 - DNA, 534 bp, Aspergillus oryzae
gtctatcgtcctacgtgctttatcatcccagaaaccattaatctacttcctcgcgcatataaccagccctgtcgcaaaatcgccgcgcaggtcttcttcaacgctgtcaagctccgctaagctgctactcaatcatcaacaacctcgtttgagcgcatttcatacgcacaccatggcttccgcaaccaccttcttcgactttgagccagttgacaagaaaggctctccttttcccctcaccccgctcaagggcaagaccatcctcgtcgtcaacactgcctccaagtgcggctttactccccagttcgaaggtctcgagaaactctaccagaagctgaagtccaagtaccccgaagactttactatcctcggattcccttgcaaccagttcggcggccaggatcccggttccaacgatcagattcaagacttctgccagctgaactacggtgttacattccctgtgttgggcaagctggatgtgaacggaaacgaggcctacccttgtggacctggatgaaggagcagcaaccc

SEQ ID NO: 5575 - DNA, 558 bp, Aspergillus oryzae
attcgtacggctgaagcggcacaatatgacgaacaatatcgacatccactatgcctctgagtctgaatcggccgccctgggtcatattaatatagccagttttagacacgggctagtgtggctaaatgctttgccggggatggatcctgaggtctgtatgccgatgaaacaggctcgctgtcttgagaagctcgcctcccctgatattcatgtcttctccgcggtggataccagtgtcgatcgggtagtggggtatgcccgttggacagtcccctgggaggaaaataaagtcgagttatccgaagagggccggacgatggtggcaaatgcagcaagtttaagaccaaaggagatgagagcagacatctgggaactgagcttaaagttgatgaaagagaaaaaggcggttcacaccacgaaagacgatatgatgctggatatactagccgttttgcccgaataccaaggaaaagggatcggcagcaaactgctccagtggggaactgaacaggctgatgcgcggaatgcgcgaatctatctggaggctactatcgaggg

SEQ ID NO: 5576 - DNA, 399 bp, Aspergillus oryzae
tcttatcctccgtggaagcatcgttgacggcgaggtggctcgtgtcatcatgcgcgatggtcgtatcgacgtcctgccgaaccatgagatcccggttgacgaagatcaagacatgctcgatagtgaagatgaagccatagccgagatggaagacggcagtggtgacatggatctctacgagtaaatttactaaaaaaaagggggattatcagcaaaaaaaatcaaaggggatgtgcatttttgaagatatggagtgatgactgatgatgataacatgactttttcttctcgcttgattatgggtattggcgttgttgttaatatttcttccttggacatattatatgcactttgtacacagcattgagataatgtgctttaataaatagattcagctgg

SEQ ID NO: 5577 - DNA, 214 bp, Aspergillus oryzae
ccagaacgtgattgggatgagtgttgccggaagtgactacgagaagctgaaaagatacaatctagctgagctctacaaaccagcaccaagctcgcaggaagtcgagcctaaaccgtcaactgattgaatctcggtttgaaacaactttcgtagtgtatgagatattttgggttgagcggtgaaaatagtgaatgcaattttttggatacttatg

SEQ ID NO: 5578 - DNA, 624 bp, Aspergillus oryzae
cggaaaatgatatcgatgttgatttacctgttgctctggaacaaagccctgtcagcggaaaggaaattcaatacgaccagtcctctgcggcacttactgaaacaaaaacctcgaacctatcctccttcgtacacttatgtcggcttaggcgactggagagcaggataaagcaggaactttacagtgctagcagcccggccaccatgccggactatacctatgatacaataatcgactcttatcgacaggaactcctcgagtggttgaacaacatacccttttttacacccgatggtaagctacaggaaggctactctctgtatgataccccagagttcttccgcatacaatacagcaaggctctgcgcatgcttctacaacaccgaatcacccactttacctccgagacgaactctcccaaggataaagaatacctagcattaagtgctagagccgctggagacatttgccaatactatagaacgttacaccaaagaaggcctttggggtggaacttcctcgctctgcattccatcttcacagcaggtctaacattgctatactgtatctgggcagagagggagcatgcagacttagctcgattcgaagacattcgctcatgtt

SEQ ID NO: 5579 - DNA, 564 bp, Aspergillus oryzae
cggcacgagggcgcaatctgagcatataagcgaattgagcaagaaagaacaagcgcagttgaacacaggggcagaggagctagcggaacgactgcgactgctcaacgctgaatacgaggagaaatttccaggattaagatttgtaacttttgtcaatgggcggagccgagacgttatcatggtggagatgcgacaaaggattgacagaggtgatgccgagaaggagatagaagaaaccatccaggcaatgtgtgatatagctaaagaccgggcgcgaaagttggaacagacgtcacggatatagatacttgaagaacaatgatactataggtggaataatcttggtacatcgccgcaattaaccgccgtcagattcagatagttcatggtcaaggaaggtctcgtcgttcaacgcagacatccagtcatgatcgcttgagtggtggtcaagcgttgtggctatggcaaccgatgtggagaccagttcagaagagagaactctgctcggtctctgtactgtatactattatcagtactccaacgatttgtcatgtcttctagaaa

SEQ ID NO: 5580 - DNA, 450 bp, Aspergillus oryzae
gcgtaagagcctttaatgctctaccctcattggactagccgtatcgccgtcgacggttgtccttcactcatctcgttgtagatgtatcgttggctagcacaagatgcagagaatgctcctattgtgaatcctttgactcagtggaagcattctctgtgtggtgtgtgatagcagcactgctccctagttgcacaatgatcgacacatgacacactatgccactgtcgacatatagcaacattccaatttctgggtatgttaggatgtggccagccttccacatatatctagtggacctgtgaggttcaccgcatcttggcaatgaacggatagaccattttgacatcttggtggcctgcaacgtcctgctcaaggcaacacaatactttacgtaacactgacagttgagtcttgagtcagggcttataacctacggttagaattgatagg

SEQ ID NO: 5581 - DNA, 420 bp, Aspergillus oryzae
gcaattactctattacgtctaccctatagatttgtccaccactatgctgggccaatttgtcggatccgccatgctcttggccgctaccgcaatctttctctactacacggcctggactcttctcatgccatttgtcgacctggaccaccccctccatgatcttttccctccccgcgtatgggctatccgcatccctgtcatccttactctcctcggttcggctgtggttggtacattcatcggaatcgtcatgatcaacagcaacaagaagaaggcggccaaggccaaggctgcggcagcgaagaagaagacttgagatgttgcaataggcgcgaacttaggtgtgtgcgcagggggaacctggatgcctgggaacagctgtcatatacattgtaacaatacacgtcatattcccttttg

SEQ ID NO: 5582 - DNA, 481 bp, Aspergillus oryzae
tgagtttttcaagaagttctacagcgatcttgttggagtggagaatgcaaatcgctggaagacgtccctgtatctcacagctagtgcatctgccgagcttattgctgatgtagcactttgtcctttcgaggccgtcaaggtgcgcatgcagacaacaatcccacctgatatccgatcgactttcacagggatttccaacgtcgtttcgaaggaaggtgtggctggactttacaagggtctatatccgctgtggggtcggcagattccgtacaccatgatgaagtttgcttcattcgagaccatagtcgagatgatttacaactacctaccgggtcagaagtctgattacaacaaaggcgcacagactggggtggccttcactggtggctacttggctggtattctttgcgctattgtctcccaccccgctgatgtgatggtgagtaaattgaacgcaaacagacagcccggcgaagccttt

SEQ ID NO: 5583 - DNA, 559 bp, Aspergillus oryzae
cagtaaataaatacaattggcaactcttttcgcaattatactgcgccatggatccattctcggcagaaggtgaacttatcaacattcacaatgccttccaccaaggccagtaccaggaggtgatcgacttcgacacatcagccctatcctctgaaaaccaccttcctgctcgcgttttaaagcttcgcgccaaaattgccctgggacagaccgaccaggttctctccgacgttgacggcgaagaagacacccccgaccttgcggcagtgaaggcgttggcgcagcaaacagctggcgacagcgaggctgccctgaagctcacacaggatctggcggagaactaccccgacaatgctaccgtacaggctctaggtggaacagtgctgcaggcgcagggatcgagcgaggaggctctggctttgttggcgaagcaccaaggcaatctggaagctgttgcgttgattgttcagatccatcttcagcagaatcgctccgatctcgccctgaaggaggtgcaaactgccaagcggtgggctcaagattccctgcttgttaattt

SEQ ID NO: 5584 - DNA, 576 bp, Aspergillus oryzae
ccaatcccatatccgaccgagatgaagaccgtcgcagcactccggaggtgtcctcttacccactcctaccggccatcaccgttggtgttcgatttcctcgcaccgtcaactttgcgacagagctctcgcggatacaaatccacagcaaagacacccttttggggcaaatcgcatgatgcatctccatcgcccgacacaacccctatttcaccaaaacccaaatatgtcctcagtcaaaaacaacgcgagttcttggatagtgctcttcgggtcaaccaggcaggagagcttgcagctactttaatctacaaggcgcaaacgccgcaggtcgtgcgctcccatccccacctgcgtcctttgatgaagcacatgtatgatcaagaggctgggcacttttcgacgttcaatcaaatggttgcgaaacatcaagttcggccaacggcaatgtatccgatatgggaggtggcggcaacatttctcggctggtcgactggagcaatggggcgcgaggctgccatggcctgcacagaagctgtggagacggagattggctctactataatgaacaagtgcggg

SEQ ID NO: 5585 - DNA, 490 bp, Aspergillus oryzae
ctcggcccgaaatggcaaaactacaggatatcccagaaatcattcttctttgcatggaggagaagttcatcacggcattcaacgaagctctcccaactcaatggccgtccttcgcagaaaacccgaaggtcaagattaccgtgcttaatatgggactccatgcggtccctgccacgaccaaattccaattagttgtctcacctgccaactcctacggccgcctggacggcgcctttgatgatgcgatctcgcggaaattctgccggccacatcatccttatgacacactcacgcgcgcagcgcagcaagtgctttacgaaaaatggagaggctttgcgcccccgggatcttgcacgctggtcccgttccctaaagatatggaaggcacaaatgcttggggttgtaaatgggtagctatttgtccgaccatgcgagcaccagataacgttacgtgggaccgagaagtggtgtacgagtgtgcgtggagttt

SEQ ID NO: 5586 - DNA, 475 bp, Aspergillus oryzae
cgagaagaaagaagcgaaaataccgggcgcaacaaaagacaagaaaccatatatcgaaaatgacaataacaacataccccggggcgctcacctccgatccaaatctcacgaatctatctctatctcgactgctcgcccgtcttgaacataatttgctctcgtcgtctgcggacttgaagccgcttcgtcggtcagagtatcaacgtatgagagtgggagctaatatagaatatgcccgtgctacactccaagaattagaacggagtcttccgcagattaaaccagtcgatcgtcgtcatgaaattcaatcggatatcacccgggaccgccagaccctgaaacggctacagagtgtattaaatcagctaaatgctgaggcggagataaagctctccgccgtaggcgggcagggactgcccggtgcggaggggatttacgaagatgaggacgaggagtcggtggacggggaggattt

SEQ ID NO: 5587 - DNA, 321 bp, Aspergillus oryzae
cgaatcttctttcccactccgaagaaggaatatgctctgccgttcccgttaattttgccctattcgctgacctccctcgacctctcccccgcacaatggccaccgtcgtccctaacggccatgctaatgcgacccagtccgccgatacggccgaagaacgcagacgagtccaccacgatgccgacgttgtgatcagtgggcgcaggagtgctaggatgtgcgcttgcagttacactgggaaaacagggccggagcgtcctactgctagaagcctcgatgaaggagccggatcgcatcagtcggcgagctattgcagcccgg

SEQ ID NO: 5588 - DNA, 537 bp, Aspergillus oryzae
tgcagagtggttagccggtgagcttggcatcgattacgcattcgctaatcatgtaagtacatcctgttctgtcgggcctttacctctttggggccaagttggactattcgatggtccggtgtactgattatcatgtgtagctcgaggtagatccagcatctcaaaccctgacgggaaaactcgttcccacctaccctatcatcgatgccagccaaaagcgcaagcttctgcagtccattgcggccgagaacaacatccctatcgctcagaccgctgctgtcggtgatggtgccaatgaccttctcatgctccacactgctggactcggagttgcctggcgcgccaagagcaaggttcagctcgaagcacccactcgtctaaacggagagactatggtggatattcttcaccttctcggtctcagcaaagaagatgtcaaggaactgaccaccgaagtagcatgagcgtcccagaagccgtaggtgtgtcgcaaacacgacagaagacacatcctattgcaatgatatctggccaaga

SEQ ID NO: 5589 - DNA, 469 bp, Aspergillus oryzae
gaaaaaagaaaaagcaaaaagcggccagcaagcagagtccagtcaccaccagtcctcagcctttctttgcaacgatgcgctcaagtcaagacttatcgacaaaatgaagaaatgaagataccccgccaaagaaaggatactgaacacgaaaggaagacaggggaaaaaggtagaaaagagagggcccgtcattcagcgacgatatccgaaaatgccaagaaggaaaacgaaaaggaacataacccgtgaacatacctggcatggtgcttgaaggcgacgttattctaatgcgatatcgaaactggtttacaacggatgtcgaagcagaggatgttaaagaaaagagtcgtctaagaagaagaaagggatcttgttggggaagaagaatgttggtctgtcttggcagatggtgccgcggaaaagcaacgcaaaagaaggcgactttataacgcccggtgagcggcacaaa

SEQ ID NO: 5590 - DNA, 524 bp, Aspergillus oryzae
ctaatacgccaaaatgggtcgcgttcgcacaaagaccgtcaagcggtccgccaaggtcatcattgagcgttactaccccaagctcacccttgacttcgaggtcaacaagaagctttgcgatgaggtggccatcattgccagcaagcgcctgcgcaacaagattgccggatacaccactcacttgtatgatttcccgtgtgcctgaaattacgaatatggactggtctcgaaagaaagaaagaaacacccccacgactaaccggacttttttcaactcaataggatgaagcgtatccagcgcggccctgttcgtggtatctccttcaagctccaggaggaggagcgtgagcgtaaggatcaatacgttcctgaggtctccgctctcgacttcagccagcactccgagactggcaagctcgacgttgaccaggacaccaaggatctccttaagagcattggtttcgactctatccccaccaacgtcatccaggtttcccagcagcaggtcttcgaccgtccccgcc

SEQ ID NO: 5591 - DNA, 573 bp, Aspergillus oryzae
acgaggcaggatatgacagcttgcttactgctcagatatttatcaagctctctgctcaacttcgtgacggaggtatctccaagctcccggatccggtagaactgaaaggtcaatcggatactatgggcctgaacaatacgaccttggctgttccggaaagcctaaagggcagtgtagagaaggaatcggcagcgagaaaaaagccgctcaagacaccgacgagcaccaagcttggcacgagatttgatgcacttgatgttgaagagattaacgatcgagttgaaagcatggccctcaaatcgcgtaaatctagcagctccgtcgatgtcactcgaaaagtcgccaatggggaattaattccccggcaaggcgccgagttttggaaggtctacggtaataaattgcgtgtctttggtacggaagaaagagtctggaatgttgtttaggagctagcgtccagctaaacataccttcatctgaaccagtcgaggctctccattggatgatgacctttgcgttacggagtatacgaaaataatatactggttcttcctcacatgggatggagaacag

SEQ ID NO: 5592 - DNA, 477 bp, Aspergillus oryzae
cggcacgagggtttgtttatcgactgactgatttctgtgaaaccaccttaactcttccagctacggaaacgctagtgggatctactccgtaatggcagcgacatcgtacagttttcgagtaggcagacatgtttcgccggcggtctgcatactaattaagtctcggaatatcagtcccacaaagatggggatagtcacagtcattccggtcacagttcgcagcattgccaaggctctaggagcgaatcctggcgagtgaaccgagcgccctgagtttcatttaccagccaatcccaccaattcagtgatagataacacgcacatggctgggggttttgacctggtctacatcatctacgaacccacccgatgtctgcaacaaagccgcccagggagataagacaaagagaatatcacagcagaaattacctataaggagaccgagaaagaaagaaagaaagcaagaaagcaagaaaa

SEQ ID NO: 5593 - DNA, 532 bp, Aspergillus oryzae
cccgatggaaactttgaatgaggtggcatcccagcaagatttatctgtgccttcgaatgcatctggaggcgtgatcatttacctccgccaggaaggccgcgggatcggtctaggagaaaagcttaaagcgtataatcttcaagaccttggatcggataccgtcgaagctaatttactccttcgacatcccgcggatgccagaagctacggtcttgccacagcgatgttggtggatcttggtctaggtgttgattccaacccacatggaatccgcctgcttaccaacaaccctgacaagatccgggcggtcgagggaccgaaccgggaagttgttgtgaaggaaagagtactgatggtgcccttggcctggcgaacaggtggaaagatgggaattacgagtactgaagtcgagggctacttgcggaccaagatttcgaagatgggccatatgctccaataaaacatctattcaccattcttcttgctgcatgctttacacgatttccccatgagttttgcgtggaggtgctgg

SEQ ID NO: 5594 - DNA, 512 bp, Aspergillus oryzae
gtcggttggcgcggtctctgttcatggaaatatctgccagtatcaatggcaccgtcaaatccgctggcgaactgggagaggctgggcgatagtttctatagaaaagtcccgatatacgacgcgatctttgatgaagatgttgaactagagaactacatcgtcgcaggcgcgccatacggaggggctttagcattgcatcgcgatgataccaagccatacaggttccgtgatgctcagaccgccaagtcgagcattggtatctattcctcctcgggaaagctgattaaccgacttaattgggagcatggtactatccgggggctcggctggtccgacaaagaggagttgttagtgatcacggaagacggtaccgttcgacgctatttcggactgtatggagactttacttcattttctcttggaaacgtaggctttcgatctctatatctactattttcggcgctaatatgcgcagggagcggaagaatatggcgtcagagcttgtcgctttt

SEQ ID NO: 5595 - DNA, 401 bp, Aspergillus oryzae
gggcaattcgcccttcaataatagtccagccccgtatttcccccagtacggcggacccggtggacctatgacccctcaaggtccgaacccagctggaagaggctgggatcagtccggaatgggcggtcagaactatggccaggtcccaggaaatgcaggttatggccgcggacaagctgcccctgcctctggctggaaccaggctaacaacgctaattttgggaatggctttggaggctaccaagcgtagcctatcgtccagtatacttcgctgcatgccggccctatcgaacgttccttagatggacaatcgagcataaacagggctgcctgtgtcaacaactttgttaagaagaggctctttccttctccctttttacttttctcctctcctttccctt

SEQ ID NO: 5596 - DNA, 380 bp, Aspergillus oryzae
gtcgagatggtcctcaagactcaccgccccattgctgctgaggctggccagcgcttcaacatccgtgagggtggccgtactgttgccactggtctcgttacccgtgtcatggacggaaaataaatgccagctcgttacggtgactgatgaattggcaacctttgtactatgaaaaatttatgtccggatttgtttttcttgcagcgcgggaatcagcgaagggatccgggaaacgttgataccggagttcgtgagtcatgccatgtacctgtattgtatttaaccatgtagactttttatttttctcttttttctacaattctcccctcatctatatctaggtatgtcgttgaatatgaatccgatgattaatttaatgt

SEQ ID NO: 5597 - DNA, 534 bp, Aspergillus oryzae
gtcgtcgtgaggtgtgaagccctcaacatctccggcgagttcttccgcgcgaagctcaagtaccacgcctaccttcgcaagatgacccgtttcaaccctacccgcggaggtcccttccacttccgtgctccctctcgcatcttctacaaggccgtccgtggaatgattccccacaagaccgcccgtggtgctgctgccatggagcgcctgaaggtcttcgagggtgttcctcctccctacgacaagaagaagcgtgtcgttgttccccaggctctccgtgtcctccgtctccgccccggccgcaagtactgcaccgttggccgtctcagccacgaggttggctggaagtaccaggacgttgtcgccagactcgaggagcgcagaaaggtcaagagcagtgcatactacgagcgcaagaaggccgctcgccggcaactcgtccaggcccagaagtcggccggtgtcaagcgaccagaccaagagccagcttgctcagtacggatactagatacctcgttgcgcggctggttgctt

SEQ ID NO: 5598 - DNA, 433 bp, Aspergillus oryzae
ggaattccttacctctgggtgaaccactggctggttgccatcacttacctccagcacaccgaccccactctccctcactaccagcccgaggtgtggaacttcgcccgtggagccgctgccaccattgaccgtgacttcggctttgttggtcgtcacatcttgcacggtatcattgagacccacgtccttcaccactacgtcagcaccatccccttctaccacgccgacgaggccagcgaggccatccagaaggtcatgggctcgcactaccgcacggaggcccacactggctggacgggattcttcaaggctctcttcaccagcgcccgtgtctgccactgggttgagccgaccgagggtgccaggggcgagagcgaaggcgtgctcttctaccgtaataccaacggcatcggagttcctccggccaagcttt

SEQ ID NO: 5599 - DNA, 509 bp, Aspergillus oryzae
ccgtgatggagtttttcctgtatctcaatcagtccaccaaggatgctcaatacagctccacttcgacacatctgccgtcttcacagtccaccgattctttgagctcctcggtctcgaattaccctcttcggatcaaaatggatgagaagagagattacccagaggcccagtcgccctattgccagcagatgcaagtgctggataatggctctgtgagccccatttcccagcagacgcttcaaatcaaggagttggagccgacaccgacgacaacgctcaaatactctgcgagcgcgacacaaacttacacggcgaccgcacagtatgagcatgtgtgctattgtgtcgcattgacggattagcatctcattagagagggtatctactataaaacccgaggagtatcggttggtactgcctcgtggagctaaagcgtcggcgttaccaacggtggaaacggtccattatctttcatgtgcatacgaatgattggttctcttctgcggtca

SEQ ID NO: 5600 - DNA, 195 bp, Aspergillus oryzae
atttcaagaagcacgaattggagattggaatcgttggcggccctcggacggatggtaaagagggcacggatgtcaatttccgggctctgacggaggatgagattgatgaacggctgcaagctattgccgaaaaggactgaatgtcgaacgtatgaacatgcatgttgctagacgcgaatgatattttaatagcac

SEQ ID NO: 5601 - DNA, 450 bp, Aspergillus oryzae
accgcgggtgctggccgccatcttccaggcagcatcagcacggcatacggggacgtcgagtttcaacctcgccgatgtaaacccagccgtccaattcagcctactagtcatgatgtatatctctgtattccctatcgccattagtatgcgtgcgtccaatacctacgaagaacgttcacttggattgttttccagtgacggtgaggtcgtcgacgagagcaacactacgaattacgtcctgtcccacgtgcggaaccaactcagcttcgatctgtggtacatttttcttgggatattttgtatctgcgttgccgaatcaaacagaatcatgaacccttctgagccgggactcaccgtctttgcgatattctttgaggctatttctgcatacgccaatgtcggcctcagcttagggtatccaggggtcagtacttctttaagcggacagct

SEQ ID NO: 5602 - DNA, 415 bp, Aspergillus oryzae
tacaaaaacggagtgcagcggcactgagtaaattgaaaaccgcaagagtacccgaggatcttgactggcttgagccagagggtgtcagaggctacgaaagcatgagtgatcctggggagactgctcaagtccatccgtatctcttcactacgtccatcgcaaagctcgccgaagagaaaggcgcaaagattacgcttgggtcagtcacaaatatcgattactctggggattccgtcaagtcagtcacatacacaagccaggagaacggcgaatcacagacaatccctgctactgatgttgctatcgctgccggtccgtggacgagatcggtcctgccgggtgccccgatatcagcaacgcgtgctcatagcgtcgtgatccggcctacgaggccagtcagtggatataccctttt

SEQ ID NO: 5603 - DNA, 383 bp, Aspergillus oryzae
atctcgttgcgcatctccgacgttcaagatgcgtacctacgacgattctttcagcggtcagaagatctaccctggaaagggtaagctgtacgtccgtggcgacagcaagatcttccgcttccagaatggaaagtccgagtccctcttcctccagcgcaagaacccccgccgcatctcctggactgtcctctaccgtcgccagcacaagaagggtatctctgaagaagtcgctaagaagcgtacccgccgtgccgtcaagtcccagcgtgctatcgttggtgcttccctcgacgtgatcaaggagcgccgcaaccagcgccctgaggcccgtgctgctgctcgccagcaggccatcaaggacgccaaggagaagaaggccgctt

SEQ ID NO: 5604 - DNA, 386 bp, Aspergillus oryzae
cctcgtgccgaattcggcacgaggggtggacttcacaaatccggaaaacttctatcatgacgtgaacagtgttgctggattactcaagcagttctttagagatttgcctgaccctctgttcacgtcgcagtcttataccgacttcatcaatgcagcccgcattgacgatgatgttcagcgtcgagactcgcttcatgcgcttgtaaataatctcccagatgcgcactacgccacgttgagagccttggttctgcatctcaataaggtgcaagaacattacacccaaaaccgtatgaacgcaggaaacattgccatctgtttcgggcctactcttatgggcgccagttccggcggcaacgtcgccgacgctggttggcaagtccgtg

SEQ ID NO: 5605 - DNA, 339 bp, Aspergillus oryzae
agtcagccttaccgctcggccacacatccccgtcaagtattgggctgacaccatccgggacctacaacaccaactagtttcagaatcaggttaactgacaacccgctcggtctataacacaaataccccgacaataccaggtagattcctagtgtcagcgacaatctccgcgcccaacgcgttgccatcgtggtcgccgtcggatcactcctttcaagcggttctatataattctcttcttttctatctttagttcggtcccaggagatcacttagttgcggacaccgtgtggagcgccccactccaatttggccgatagtcgctttgtaattcaactt

SEQ ID NO: 5606 - DNA, 506 bp, Aspergillus oryzae
aaagaaccatacgtttattttacctcttacctctttgacatttgattccttgaaaggtttccgacacaaataactgcgcgctacctcctaccaccgctagaagagctggtttcatctagctgaacaatgaagggaaggtgacaccgtctagcgtcagtgccctaggtcccagtctcatatttcctagccagaagagcaaggctgtttcttggctacctagtcaccttagacatgaagttcctcgcatcaacaaagcagtttactctgcggtatgttccgaagcatgtcatatctcctatcgcttcccggtacctagcttctccgaccaatcctatccggttcaaaattcaacatttatatgccacccgtgatcggactacattatggtggagagtatctctacaacatctgcagcagcaaaagcgagtggtccggtcatggtgtgcacggagggtccggatagcggttcagcgcgcattgaaagagcgcggctttgatactgaggg

SEQ ID NO: 5607 - DNA, 327 bp, Aspergillus oryzae
aaagtccttcatgaatctgccatcgaggggctgcatgagccgcgatgtcgggaccctgatgtgcacatcatcctgccgagtttgttccagttgaagagtatctccgagcggtttactaagttggctgacggattccaagggctcttcgggttctgcggttgtgtctgctgtttcacctaaactggaactgtcggctaacatgcatggatcgctgaagctggccatcgctacggatgccctgcgcatttcgagtgtctggacggacctggtaaacccgtcgctggatccggggcagctctctcagacggaaattgagcagctgcctag

SEQ ID NO: 5608 - DNA, 388 bp, Aspergillus oryzae
tttgctggacgacagtggcgagatccgtgcaactgggtttaatgatcagtgtgatatgctctatgacgtcttccaggagggcagtgtttattacatctctagcccatgcggcgtgaagcttgccaagaaacagtttaccaatttgaacaatgactatgaactcacatttgaacgggatacggttgttgaaaaggcagaggatcaagccgacgttccacaaatcagattcagctttacgaccatcggtgacctgcagtctgtcgagaaggataccaccattgatgtaattggagtactgaaagaggttgctgaggtttctcagattatgtccaagaccaccaacaagccttataacaaacgtgagcttacattagtggacagcacgggg

SEQ ID NO: 5609 - DNA, 431 bp, Aspergillus oryzae
gaacatcttcatctggatcgatctatccataactgtgaaatcgctattctcgtcttcttctcctgctccttgcttttatagtcattcgttgaaattcattatcttacgaacgcatcacgatggttctcctgagttccttggccgtcgttgccactgtagcaagtctcgctacatgccagaacactagcactatcgacccaagcactgttttagattcgacgagaaagcaatggtgcgaatcgcaaacctcagcttgtcctctcatctgtctgcaactgccaggggcttcgggcagccccaaggagaacaaatgcgacttcaaatcccttgtatactcgtgtatctgcagcaacaaccagtctcccaacgcatctgaatactcccagacaatcccctactttgagtgcacagagaaaaacaaccaatgcgtt

SEQ ID NO: 5610 - DNA, 466 bp, Aspergillus oryzae
tgtcatctactaccttcccgttcttctgaagcagtccctgcatcagagcaatgatgaggcccttctcattggtggtatcaacatgatcgtttatgcgatctttgccaccttctcctggttctttattgagaagattggtcgtcgcaagctgttcttgggtggttccattatccagaccattgccatggtcatcacttttgcttgtttgatccctgatgacacgcaggtatccaagggtgctgtgttcggtctgttcttgtatatggctgccttcggtgctgcttggcttcctcttccctggctgtaccctgctgagctgtcccccatcaagactcgtgccaaggccaatgctgtctctacctgcagcaactggctctttaacttcactgttgtcatgattactcccgttatgatcgctcacattggctggggtacttacctggtctttgccgccctgaacgccctg

SEQ ID NO: 5611 - DNA, 162 bp, Aspergillus oryzae
cggcacgaggctacaaccggggggtcttcaactcatggctaagtggctagtgggaagtctatcttgttcagtctgttgtgtcgaagattgggagcttctacattgacatcatgtatttttaaggactttttttatttatatcagggtactttctggatgatg

SEQ ID NO: 5612 - DNA, 458 bp, Aspergillus oryzae
cggcacgaggcaggaaatacggaggaaccggtcttgggttgagtatctgtgctcagctatctcgacttatgggaggcgttattctactggatagtgaagaagggaacggggctctatttaccctgaagataccgttgaaatttgtcaaggaggcagcagctagcacacgaagttccagcattgccggctcaaggacaccgagtgtcgtgtcgctttcactggaagagttttccaatattgctcagacaccatcaaaccacagctctgtgggtaacaaggaaacactcaccaatggcttcgaaaagcccgatgtccaaccacgtctggttgggctcagtcagcccttcttcgctcctactgttccatcagccccttcttccccatctaagggtcaagagtcgaaccaaagctcatcggataatggttcgaagaagatccgtgtgttaatggccgaagat

SEQ ID NO: 5613 - DNA, 215 bp, Aspergillus oryzae
caagaaatggcttgcttttgaggagaagcttgcagcagctgatggtggtaatgaaaagatggtggaagacatcaaagcgaaggcagcagattatgtcaagtctctgcagcaagagtagactccgcatcctgtgtgaacatattttatgatggcattgtgtttgggtcatagatactgtatataaaaagccttccaactgtgatatcttattctcg

SEQ ID NO: 5614 - DNA, 479 bp, Aspergillus oryzae
gtttggccggacccaattgatccaactgtctcccaaaaagacagtcgaggggttcctcggtgcttggatttgcaccataatcttcggctacttcatgaccaatgtcctaatgcgctacaagtacttcatctgcccggtaaatgatctcggatccaatgtgttgacggggttggaatgcaccccaaacccagcctttatgccccagccgtaccaagttccagagtggaccggagtggacaagactttttacgtcgagcccatacagttccatattttgatcttcgctacattcgcctccctaatcgctcctttcggtggcttcttcgcttccgggcttaagcgaacctttaaaattaaagattttggtgaatcgatcccgggtcatggcggtatcaccgatcggatggactgccaattcatcatgggcttctttgcgtacatgtactaccatagctttattgccgtgtacaaagctaccg

SEQ ID NO: 5615 - DNA, 333 bp, Aspergillus oryzae
cggtcaacgaaaaatagtcggatcttcgtgtctagccggatttcacggtgtgaacggtcatcactgttgcgtacgctgaccaattgaggcgctcttccctgtcttgttcaggatctagaagctgggattatgtgtagcctatttagccataccaccaattcccgcatggcgctcgaagagagtgaacacgggttctattgtacaacattaacggtgacggtgttggcaaccaaaccaagcggtctcttaatgaccgttgttataaggttgagtttcgtgtacacggctttcggatcatggccggttttcttcgctgtcgggaattatatttag

SEQ ID NO: 5616 - DNA, 522 bp, Aspergillus oryzae
gccttctcgtcctccaactgagattgttgccgctttctgcttgatctccggtggcttgattttcatgttgagtacccgaaatgtggttgatgccatggagttttacgagctcgatgcgatgtttattttcactgtcgctatgggagtgaccgctttcataatggcctgtgagattttggctattgccatcaaggcctgggccaccaagaaagaaactcgccctcagctccctcctttccagttcccagcttgagttggagcacgcctcgccgtgtcgctttagggtagaggtgcgtgtccttcacacgggacatggttaagactctacctggatgggtttctcatcgcctattgaaaaccaaagaattgagaaaaaggagaaatgggaaaaggcataagagacatcgaacatccttgtctttattatcgcagcgatataccccctaaattatttgtttttggcctggtgtcagagctcaagcttacgagtggcgggcatataccactgataccacagctttg

SEQ ID NO: 5617 - DNA, 513 bp, Aspergillus oryzae
cggcacgaggccaacttcctgtcctcgtcgacgcagacattcgctgctaccgcaaaaatggccgacactcccgttaccctgcggactcgcaagttcatccgcaaccccctgcttgctcgtaagcagatggtcgttgacgtcctccaccccaaccgcgccaacgtctccaaggatgagctccgcggcaagctcgccgacctgtacaaggccaacaaggaccaggtctccgtcttcggcttccgtacgcaatacggtggtggcaagagcactggcttcgccctcgtctacgactcccaggaggccctgaagaagttcgagcctcactaccgtctcgtccgtatcggtgctgccgagaagatcgagaagcccagcagacagcagcgcaagcagcgcaagaaccgctccaagaagttccgtggtaccggcaagaccaagggccccaagaagtccaagaactaagcgcgccctcgacctgtcgaattctgatggatatggatcggatgggaaggattg

SEQ ID NO: 5618 - DNA, 605 bp, Aspergillus oryzae
ttcacaatggcatctatccttcctcgtgccggcttccgagcattcactgcccttccccgggctgttgccctccccagggtctccctcgcctccaagcttccccgcgcacagcctctggcgcagcccatcgctcgccgtttcgtctccaacatcccccaagagcagccccgactgcgtctcggatccactgctccgaacttcaaggcccaaaccacccgtggagagatcgatttccacgagttcatcggcgacagctgggctatcctcttctcccaccccgccgacttcacccccgtctgcacaactgagcttggcgcctttgccagattgaagggtgaatttgaccagcgcggtgtcaagatgatcggactgagtgccgacaaacttgactcccacggtgagtgggtgaaagatatcaacgaggtcggcaacaccaacgttcaattccccatcatcgccgatcccgaccgtaaagtcgctttcctctatgacatgatcgaccagcgggaccttgacaacatcgccgagaagggcattcctttcaccatccgtgccgttttcatcatcgaccccgccaagaagatccgtctgactatgctctaccc

SEQ ID NO: 5619 - DNA, 365 bp, Aspergillus oryzae
gtcttcttcactgcaagaacctcaagggagcccgcaaagccaaagccctcccgaaaacaccaggggatcctgtggagcgagcactatcgagcgtgatatgtcgcattatctttattttgaagataacgattgcttcttcccgccaaccgagctgggtcagaaaccaccaaggcagggcgagggacgggaaccaaggcaatcgcggatggatgtggaacaaccgcgagtcccagaggaatgagggccgaagcatttgtttcaaaggactgtcgaagagtcattcatactgctctatggctcaacccaaggatatctaaataattaggctgtacctttcatagtcgaaggccaattcatactacagt

SEQ ID NO: 5620 - DNA, 568 bp, Aspergillus oryzae
gcacaaactgttcagcggcaggagtctcgggaaacaatgttgcaaaaagcaatgttccagacattcgagagagatttaggcatgaaaccttgttaggagagctggcactgattggaagatatgttgacagtctgagtacatattcaaaagcactacccctcagaggccagttgcatcctagcgtgaccacggaaaatgagaacaatccaagccatcctttgcggaaggaggctcaggctacagcatttctgcagacttctaatacggtgaatcctcccaaatatttacaaaatcagtctgagaccaacgccgctggagaggcttgcttcccaagttccactcccccgggtcccaaatctagcgaggatactggacccgaaacgttaccagaacaaaagatattccctggtattgtgcacgaaagggctcagcggggtagtatgttgactcgggcattggctgaagatgacaaggatacgaaagacgggggtaaagatgtcaaaaattgcccaagtccatcatgaggcagccttagtacagggcgatgccatgcatagtactccggttt

SEQ ID NO: 5621 - DNA, 414 bp, Aspergillus oryzae
gcctatggagagaagaccccaaagagttcaagaagaaagttcgcaagtgtgtccgagacagcctgggtgaggaataaagcgctcttgattcatgacgagatttatgcgtgactggtgttgttggccattgggttgaaaggctcgaacatatttttttttcttttgttttcccttcgcatgatagactatttagtctatcgaagagcgccagcttttgtctccgcgaatttttatcttccatttctctaagttctgtctcccctggagttacgtgatatcggcccggagttgaaatttggacttcttgttttgcattgccgctgattcatacttctccgactatactgcagcctagcgctgccgacatatgttcagtttctgaacgaaatgaatatatctatctgcatctatctt

SEQ ID NO: 5622 - DNA, 620 bp, Aspergillus oryzae
gtcaaataaaaaaatcgagcaatgggaaatagaaagatactgggagatcttcgcttcgttagcaaatggtcagccccgtctgaacaactctcaggccgcctcagtgctcaggaacagtcggcttcgcgatgagcaactggaaaaggtctgggatttagccgatgtggatggtgacggagagttggattttgaggagttttgtgtcgctatgcgattagtgttcgatctggtcaacggtgaattacaaactgtccctgcagttttacccgattggctcgtccctgaatccaagtctcatttagtccatgcaacccgggcattgagcactcaaccggaacagttcgaacggatagaagacgaagatgatactcccggactgaaagatggattcgaatggtacatgaagcccgccgacaagtccaaatacgaagagatatataatgccaacagaaaccaacgtggtgaaatcgcatttgaatcattacaaccactctacgattcgctcgatgtccccgacaccgatgttcgctctgcgtggaacttggtcaacccctccgcatcccacacaattaataaggacgctacccttcgttcctgcatatactgaactaccgacacga

SEQ ID NO: 5623 - DNA, 637 bp, Aspergillus oryzae
cggcacgaggaaaggaaaccggaagagaagacatctcaaaatgggtcccaagaagggcggcgagaactccaagaaggcagccggaaacgcccgcaaagcggaagcggctgcagctaagaaggccgttgaggatcagaagcgtgcagctgaggaggataagcagtgggcgaagggtgctaagggtaatgctaagaaagaagcagaggaagccaagaaagcagacgcagcccgcaagaaagccgagcgcgatgctctactcgccgccgaagaagcctcccaaccctctaagcctaagggcaaatcgaaccaaccggtcaagaagtcccgtggattggatctctcccagctcgacgatcagcctgcgtctcgtaaaggagctgctctcaacgcctccggtatcgataacgcgctagacgccctgtcgttgacaggcaaggagtcgtcgaagatcgatcgccatccggagagacgattcaaggctgcttatgcggcgtatgaggcgcgccgaatgcccgaggtggagcaggagaaccctggtttgcggagacagcagcgtatagagctcatcaagaaggaattcgacaagagcgaggagaatcctttcaaccaggctcatgtctcgttcgatgcatcgaaa

SEQ ID NO: 5624 - DNA, 562 bp, Aspergillus oryzae
cgcatgtgattctgatcgggttctcggtggatactccggattccttggagaacgtcaagcacaagtggatcgaggaggccaatgagcggtgcccaggtgtgccgataatcctagttggcttaaagaaagatctccgggaagaccctctcgcgattgaggagatgagaaagaagtccctaaaattcgtcacgtcgaaggaagggagtgatatatcaacccaaatcggagccagaaagtacctcgaatgctcgtccttgaccggagagggggtggacgacgtcttcgaagccgttacacgcgctgctcttctcacattcgataagcgtaaaagttcgtgctgcatcgtgctatgatggattacccgtgacttgtgctatatatgtcgactaatggggttcggctcaatggtatgccagcagtgacggagatattcacgccgtcctggcatattcagtatgtctaacggactcaatctgacccacgcgttccgtccaggttcttagagtggattaccaaaagggaggagggtaaaattatcgatgaatgttgatcgacatctttt

SEQ ID NO: 5625 - DNA, 567 bp, Aspergillus oryzae
gtcaaccccttaagcacaccaccttacctgtccacttcgaacacttctccattgaaacattcactacacctttcaatttgcgcacgtaaacatgcctctctacaacgtcacacttaagaaagactctccccctgaagagttggagaaagccaaggagcaggccagggaaaaaggcggaaccatcaagcatgagtacactcttatcaagggtttcactgtcgagtaccccgaggaccatgtcagtactcttgagtcgagtgaccatatccacgtcgaacaggatcaagaagtaaagacccagtgataggaatacgcatcgatcccggggcaaacggcgatatagtcactgcttgcaacaaatagcagaactggccacataactaagcatcgatgctggcctggggaagttgcggttcaatggtggctgtacgatttacgaatatcctagtctagcgtttcaagagaatgtttctcatgagtaccgggactgctgtgcggaaagctggactcatctgggactgttcccttgttcaattatgacccaaaatcatatcaaattttcagttc

SEQ ID NO: 5626 - DNA, 481 bp, Aspergillus oryzae
aaaatcgcatttcacctgcaacagccatttcaggtttattatcataaccagtcatcatgggtaacggagccaaagccgcctctaagcgtgagcgcaatgccaaagatgccaagggtactgcgaagtcgcagctcaaagttaacgaggctgctaaggatatcatctgcattgtttgcagacagactttcctcaagactacccgtggtccggccctgactgagcatgctgctaataagcatagcaagacgcttcaggattgtttccccaactacgtggagactcctaagaaataaacaggagattcttcactgaggttgattgatgtttcttgtgcttatgtggggatgatgtgctttctttcggttgcggtgttttggctttcttttcggtgtttacagcggaggcaatgatgtagcatgagtataccatgtggtattgaatcggagcatgatagcgtgcgcttttcatcttgtttatgttt

SEQ ID NO: 5627 - DNA, 408 bp, Aspergillus oryzae
ggtttgcattaagtatctgaatgccggaataccatgtaattggtaaggcgtagtcctcgttacaaggagcatcggtttctacgatctacgggctgcgatttcccctcaatacaagcaattcctagcgcttgaagatgtgcttaggttgcagttgccatctccactgcgtaggacaggtgggaaaataaataaagaaagggaaaaagaaaggatgaaatgagaagaaagaaataagcaaataaagggcaagggccgaaaggaaagtctatcgatcgaggtcgacaatagaaagaaatttggtcgcagtggcgggtggcgggcacaggagaagaggacggttctccgtaacgggagacaatcgcctgaggcgcctgactttgagaaggagagacttcgctttcgcttttt

SEQ ID NO: 5628 - DNA, 521 bp, Aspergillus oryzae
caatcttcgttccaggcgcaggatactcatctctttgcgaccaagactccctcgtcaccaacccccctcaaatcaatcaccatgtctcccgctactgctcgtggtcgtaaggcccagaaggtcacccacaagttcaccatcaacgcttctcagcccgtgagcgacaagatcttcgacctctccgctttcgagaagttccttcacgaccgtatcaaggttgagggccgtgtcggcaacctcggtgacaaggttgtcatctcccaggtcggcgatggcaagatcgaggttgtttcccacattcccttctctggtcgctacctcaagtacttgaccaagaagtacctcaagaagcagcagctccgtgactggcttcgcgttgtcgccacctccaagggtgtctacgagctccgcttctacaacgtcgccagcgaggaggctgacgaggatgaggagtaaatgtctcccactctcggataaaagtgaaaaaattggccaggctcgagtacgctcacatcaggggg

SEQ ID NO: 5629 - DNA, 540 bp, Aspergillus oryzae
aaaagggtctacattgcgcaaacgaaaacaaaatgtcctggtttcagaaaaccttcaccctcgctccgaaggcccgcggttcatatctcatcgacaaggaggtcagagatcaacttcccgagattgaaaacttcaaggtcggaatcttacatctttttatcaaacacacgagctgtgccctctcgttgaacgagaactgggatagtgatgtgcgcgaagacatgaccaatgcacttgaacgaattgcgccttatgatcgggagggagacctttatctccattcggcggaaggagaggatgacatgccggcgcacattaaatctgcattgattggagcttctgttagcatccctatttctaatggaaagctggccaccggtacttggcaaggaatttggtatctggagttcagggcttataagcattcgaggagcattgttgctactatccagggagagaagtacgagtgactggatgcgaatgtgaaggggaacttatgatttatgaagttatgcaaatgttgttagaggggcttagaaa

SEQ ID NO: 5630 - DNA, 525 bp, Aspergillus oryzae
ggcaagttccgccagaacctcgaggaaaccggtatgggctacgaccgggaggtggagatgattcggatcgcgcacgagatggacctcgtcacgacgccgtacgcctttaccgtggatgaaggtgagcggatggcgcgcgccggcgcggacatcatcgtcgtccacgtggggttgacgacgtctgggacgattggcgcgcagacggcgctatccttggatgactgtgttaccatcattcaggagattagggatgcggttgtgaagattaatccggagattattgtgctgtgccatggtgggccgttggcgggacctaaagatgcggagtatgtgttgaagaggacgaagggtgtgcatgggttttatggcgcgagtagtatggagagattgccagtggagatggccattcaggagaatgcggaggcgtttaagaagttgcaggttaatgtttagtatgactctttttttcgttcgggtgtattggggtgatgcaaattgtatgtatgccgctgcaggcaagtttac

SEQ ID NO: 5631 - DNA, 500 bp, Aspergillus oryzae
ctttttttgtgcaaagggtgaaaactgaaatgatctcctctgacacgggcccacgaacccctgcaatcaagtcatctctcttcccgtgcttgtcaacaatgcgagtcattggagagatcagaatgttacatgaggagattgttcgggaattgagtgactctcaacaagggaaatgatactaactattttttttattcctttgtccccttgcttaatggtcaaacaaacccggagacttgcggactcttttttctccctcggctcgtggatcgaatgagagaagactattttttttttctcctttcgtggttcagcctcgaagcagccagccgggagacgcggagcccaccgttggaacgccagtaaccattttaaagccaatgaccttcgcaggaaacataagttcacccgccaaggaagtcagctcctgtcggtgatgcccaggatccatccagacctgatcggctgccctgtggtttcaattcaataagaatcccccc

SEQ ID NO: 5632 - DNA, 555 bp, Aspergillus oryzae
aaaagaacaacttcaacctcaagacccctaagggtaccaaggactggtctgggtccgatgccctcctccgcgatcgcatctttaccaccattgccgatgtcttcaagcgtcacggcggcacggcgctggacacccccgtcttcgagctgcgcgagattctcgccggaaaatatggcgaggactccaagctcatctacgacctgcaggaccagggtggtgagatctgctccctccgctacgatttgaccgttccctttgcccgttggctcgccatgaaccccgacgtgcgcagcatgaagcgttatcatatcgccaaggtgtatcgacgggatcaacccgccgtcagcaagggtcgcatgagggagttctatcagtgtgacttcgatgttgctggtaccttcgaccctatggtccccgatgccgaggtcttgaagattgtcaccgaagtgttcgaggagcttggatggcaaggtcgttacagcatcaagatcaaccaccggaagatcttggatggtgtcttcgaggtgtgtggtgtgccggcagacaagatcgccc

SEQ ID NO: 5633 - DNA, 500 bp, Aspergillus oryzae
ggaagtgatcaaccgcggtctctccttgtcattcttcttgttcctctcctcttcaggtttctcccattagcattgctttcaactgtatctctgatctcctttgcttcacacttgcgtgttcctccgatcttctatccatacaaccagctttccatccacttctgacaagatgggtgtcactgagatcaagactcctgctgaattccaggaaaaggtcatcgactccaacgagcctgtcgttgtcgatttcttcgctacctggtgcggtccttgcaggatgattaccccagccatcgaaaggctcagtaatgagaaccagggcgtcaagttctacaaggtagacgttgatgggcttaacacggtcgcggccgacttgggtattgccgccatgcctaccttcgtgttctttaaggacggccagcaaatcaaagagttaaccatccgcggtgccaaccctggtggtgttcagaacagtgtgaaagccctgctggcataaattg

SEQ ID NO: 5634 - DNA, 443 bp, Aspergillus oryzae
gcgcgcgtctggagctggtgaaattgtaaacgatgaacatccccagttgaaaagaacgaagtttacttcaagcagaagcggcgccgcttgcgactctagcaaacgtcgtacgggtgctactggaaatgttgatgcaaatggggatcattactgggaaatatcaaaaatgcgtcgtgtcactatttcctcatttcgaggaaagacactggttaatattagggaatactacgagaaagatggccaagagcttcccggcaagaaaggcatttcgttgccaatcgaccaatttgcctcccttgtcaccttattgcctgatattgagcttacactaaaggatattggagtgtctgttccacgaccagattacgccggcggacatagtatctcaaacgaagaccacaatgaagcctctggtgatggtgatgatagtgaacgtggagcct

SEQ ID NO: 5635 - DNA, 493 bp, Aspergillus oryzae
catcgacaaccaaccccatcgaccttgttgccgccgggactttcacaatgaagttcatgaaagtgggccgtgtggccatcatcacccgtggccgttacgccggtaagaaggtcgtcattgtccagcctaacgacactggctccaaggcgcaccccttcgcctatgccgtcgttgccggtatcgagcgttaccccctgaaggtcacccgccgcatgggtaagaagaccgtcgagaagcgcagccgcatcaagcccttcatcaaggttgtcaactacaaccacttgatgcccacccgttacaccctcgagctcgagggtctcaagggctccgtcaccaacgacaccttcaaggaggtctcccagcgtgaggacgccaagaagaccgtcaagaagcccttgaggaccgctacaccagcggcaagaaccgttggttcttcactcctcttcgtttctaaacggggtttttttgggcgttatgtcgtttgagcgcgcaa

SEQ ID NO: 5636 - DNA, 572 bp, Aspergillus oryzae
gatgatatttacaccatgaatcctcgtgggttttcaatgtacctgaagcgcggcaaccgtcttatctaatagttcgagcatctagaacaaagtagtcagtgggatggactgcgacacttctctcaaactgtccctggccagaccgagcgtgtattctacggcggtgtgacatctgaggagatcaacgaccgtagcaacgatcggattggcatgcagcactgggcgcgggaaggtattgcaggtatgcatcttcctatttattctgggtgttctctcctgtatctctccgagagtatgagcctcactctgtggtcataggtcgcggggtattgattgactacgccgcatgggcggagaagaagggaatcacgtacagcaccttctccactcatcaggtgcgactatcagacatcctagaaatcgcgaaggagtgcaacatcactttccagaagggcgatatcctgtttgtccgtgttggagtaaccaaagaatgggacaccgtgatgacggatgagcaaaagaagcaatactctgacaacccgagcccggaacatgctggagtcgaagccacg

SEQ ID NO: 5637 - DNA, 487 bp, Aspergillus oryzae
acaaaggagagtggcagcgagggattgaacaacgccgagggagcggagaacctgaccgagtctgccatcatgaaggagatgggcttccagtataggctgcccgatccgacgaagagaaaagatatcgagtactaccgtgatcctgctcacagaggatatctgagccatttgttgaagcctatggagggacccagtctgttcttccgctcgccggttgagaggaagactgctgctggtgttaagaaggagaaggtcttgcccgagaacagactttggtaatttggtgcttatgaaccgtttcactaaccatgtgcttgggaatggccagcaagcattgtccagcagagaaatttgcatgcccctctatcaatggtggccgcgtgattcattatctctgcactatgtatttttcccattgatgttctctttttgatttgacagctacttgtataaatatgcactctagatacctgaatacgttggatct

SEQ ID NO: 5638 - DNA, 587 bp, Aspergillus oryzae
ccggagctcctcttgttgtccgtgagcctcgcgccgaacccctcaaaattgaagaatggcaggtcgacttagacaagaagaagttcggccctcgcttcaagaaggacggcaagactgttgcagccgctgtcgaggctctctcccaggaactccgggagaagttggctctcgatctggagcagcaaggcaagatcgaggtggatgtggagggcgtcagctcaggcaaagttgagctcgataaggaattgatcaagatcgagaagcggacaagggtagagaatgtccgtgaatacacgcccaacgtcattgagccatcgtttggcattggccgcatcctgtacagtaccctcgaacacgtgtactggtcccgagagggagacgaagcgcgtggtgtcttgtccttccctccagcaattgctcctaccaaggttctcattgtccctctctcgaaccatgcctctttccgtcctctgtcacatcgtctgatgatgaagatgcggcgcatgggcatcttcaaccgggttgacgattcctcggctagcattggaaagcggtacgcacgcaatgacgaacttggcacgccgttt

SEQ ID NO: 5639 - DNA, 443 bp, Aspergillus oryzae
aaagccggcagtcatagatgttgactttgttgatacttacaaagcaatggaaaagttgctgtccaccggaaaggtcaaagcaattggcgtttcgaacttctccaaggctgatatggagcatctgctgaagaacacctcggtcgtgcccgcggcgcatcagctagagggccacccatggctgcagcagcgttcgttcgtcgactggcacaaagaaaaaggcatccatgtcacccactactctcccttcggaaaccagaatgagctctacagtcgtgaaggcactatcggcaagttgattgatgacccggtactggtagagattggcaagaagtacaacaagagctcagctcaggttgcccttgcttggggtgttacccagggccactcggtccttctaagtccaagaccccctcaagaatcagggacaacctggcaggagattt

SEQ ID NO: 5640 - DNA, 485 bp, Aspergillus oryzae
cgaacgagcatccaaatagctgatccctccgagccagcatgaagccatcctgcacgatgactggacaggagaggttccagtgggtctctcgagtggcgaataattggccgtcaaagatttccacccatggaagcgcttgagatcgatggagacgatgacgatcgagcgggcgacggcgggtcaaacgctcgcgccgtttcgactctgaacgcgagtgatgtcatggcggctttctcggctggtggagtcccgttcattgctcatttctcatttcatttcatttcatttcatttctcgctgcaaccgctggggttttgttgttgttgtcgacgatgccgtcatggagtggggattgcggatggactagaaagactagtagcaggtatacttactgtgtatagctgtagtgtacggagtaccgtactgcatgtatgtaatttcacatcacatcattctcacatcaacagagagacatttctggaaag

SEQ ID NO: 5641 - DNA, 565 bp, Aspergillus oryzae
cactttcagagaacaattgtatcttactctcttatcaccctagtttatttatctcgagatcctcctcctacgtgaacgactctctagtcattgacatcttgaactttctatcccgccgaaccaccgagtgacgtcatcatatactacctcatctcacgcgacagctcatagacctcccactgctttccaacttccacctctccctcttcgttacctccaaacgaaaagtgaagcatcaattgactttctccaacttcaattcaatcctccaaacacgtcaagatgactcgtgccaacgaacaaactgcaaaggtcttctacaagggatcttctgaggacttcgtagtcttcgtcgacgatattgagatcctcaacaactggcgcaaggatcgctcaatcccactggccgatgtggtaaacggctttaagatttttggtactcacaaacacggtgctcaaggcatcatggacggcgctagcaagggtattctggagaccgagttcggtacctcgaacgaggatgagtgcattaagaagatcctagagaacggcgaataccagtctt

SEQ ID NO: 5642 - DNA, 440 bp, Aspergillus oryzae
cggcacgaggccgaccaactctccaaggacgattgacgacctttcgcactcgccatgcctcccaagttcgaccccaatgaggtgaagatcattcacctgcgagtgactggtggtgaggtcggagcccagtctgctctggctcccaagatcggtcctctcggtctgtcccccaagaagatcggtgaagatatcgccaagaacaccggtgactggaagggtctgcgtgttaccgtcagactcaccatccagaaccgtcaggccgccatctccgttgtgccttccgcctcttctctggtcatcaaggccctcaaggagcctcctcgtgaccgtaagaaggagaagaacatcaagcacaacaagtccgttcctcttgacgagatcattgagatcgctcgcaagatgcgccacaggtctttggccaaggagcttcagggtaccgt

SEQ ID NO: 5643 - DNA, 496 bp, Aspergillus oryzae
cttgcaagctggtgtatattcgcatccatatatcgagcttttgggaagaaaaaccatactcgatttttggtctttactttccgcgagaggacgctcttttaggatctggccttgattttcactttcctgccctctattttctctcgatatttgcaagagcgccagctatacgccgtccctttcttaagtgatgcgatagtggactatggcggccaaattgttttacacacccataccggaagacattgcggatgacaataacaagttagtaacggaggctatgaataactttggaagtgattttgaagcgtcaaagatagatatcgaagatacctggacagcctatactatcagacttttcgaggcatctcccaaaaaacagttggtaatattccggccaccttcgtcgtccagattcttcaattggatcagggttcgaagtccacaaaacgcggttgaatgggagataatgcggaagagtggtttatacatgggg

SEQ ID NO: 5644 - DNA, 548 bp, Aspergillus oryzae
ggtgttctgcccggccggatcgcaatatatctacgatggctgggcaaaggctcccaacctcaaggattatggatttgaaggccgcccgcccagtggcgtcctccgaagcaccgagggcccggcattgcaactccacgacctccccccgatcgatgcggtactgctaagccatgaggaccatgtggataacttggatcccttgggccgccaactcctggacggtcgcaaggtcttcactactcccgacggagcgcataatctacagccccgaccaggagtagtcggtcttcgcccgtgggaaactgtctccgctacgatcggaggcaaggagtttcgcattactggaaccccatgcaagcacttcccaggaggcgaggtgactggattcattttagaaacggaatcctttggtttcaacgcggctggcctccccaacgtggtgtacttctccggagacaccgtgtatatcgacgaattcgagaagatcaaggaaaagtggaacatatcggtcgcggttcttcaaccttggaaacgcacttttctctcat

SEQ ID NO: 5645 - DNA, 565 bp, Aspergillus oryzae
ccgggcattcttcctgtctggacagaaggtccggtttgatggcatcgacgaagttagcggaaacaagaagtacaaagccgtgagcgcacttcaagatcaggccgagcggaagatgaccggaatccctcggactgcaccgggatcatttgttgacttccagctctcccctaccatcactgcctttggtctgcagaagaagtttgatccatccggagccttcgcttctgataccatcaactcagacggtcttttggacttcctctctgccgactttgcgcgtgctcttaaggacttggccgctgtactcaacgacctcaaacgcctgtcaaccctaggtgatcttcctatcttacttcacgacaagtcgacgctccgggtgagatttcctggttgtgacgcagtcactgtcgaacgactctgtgacgaggttggagttcaacgagggaagatcatgcaagacgaggacttcgatgctcgtacaggtgctgaccttgccctcctgttcccctttgctcccagtgttcccgcgtctccagagacagtggattacctcttctcgaagggg

SEQ ID NO: 5646 - DNA, 442 bp, Aspergillus oryzae
ggtttggacagctcgtctccggccggacagtacttgtcccgatagacgtcgccatggtaaactctgttttcactcagcaaacgtatgagcattttaataaaacggtgacgactattgtggacagagcatttgagctgtcactcttccacgattgcaaggtttacgtcctcgtagaacactctcgtgggagccttgtttttaactcagttgacgatcattcctggccattttcggacatgtcgctggatactggcaagttaccagtaacaaggattcatggcactgacttggctcacctccgattcaccgagtcagaaagaaaggaattcattcagctatggctatttttccattacctgctatgccgtctggatccccggcagccggtcgaggcatacttaccagacgtaaaagatctgacgataactgtttggagaatctt

SEQ ID NO: 5647 - DNA, 399 bp, Aspergillus oryzae
cggcacgaggatgagcacatatccaactgcattttgcgccgcccaagtcgtgggcttgactggtgccgcctggctttctggcaaaatcctctccttgagcacaatcactgtgcccgcgcttatacaatcgacacgcgaagatagattgccgctcgacgctgctgtcaaattatggcggaacctgtataacagaggcaaaagccaagctcctcctatcgccgctgccacctccgcagcgtttctctattgtgcctgggccgttcgcgctagtacgacgctagccccgttggccccgactcatagctcttctttgtactgtgttgcagcggctttgacactgggtatcgtaccatacacccttggcatgatgcttggtaccaacaacaagttgatggacct

SEQ ID NO: 5648 - DNA, 383 bp, Aspergillus oryzae
caaggtacatttacttctggctgcaacggggtctgttgccacaataaagctgccgctcatcattgcggcgttcgcagaccatccgaatatctcaattcgggtgattctcaccaaagctgccgctgagttccttcatgctcaatctgaggaacaaccttcggtagaatcactctcttcgcttcctaacgtcgactcggtcctccatgacgaggatgaatggacccagccctggactcgaggatcagacatactacacatcaccctccgtagatgggctcatttactagttatcgctccactgagcgcgaattcactggcgaaagtggtccacgggatgtctgacaatctacttacgagcgttatacgcgcatgggacacgaccg

SEQ ID NO: 5649 - DNA, 450 bp, Aspergillus oryzae
tatttgtctattgagatatagatacagatactatctataatcaatcattcattctaccacaatataatatcctcataatcaaaagagacgaaaccagaccaaaagcatataaaagaatcaaaatggtcctcatcacccgcggcatctccctcaccaacttcctcgtcgcatcctccgccctcgccttccaggtcttcgtcctgtatccctggcacaagcagctagacgagagcttcgaggacctgaagaaggagcatttgaaggttctgcaggttttggatcgggttgagcatggcaagacgggtggctcgggggggagtattcgggagcagattgagttgaagagacaggggctttagagtatttattatctttatcttgggtttgggtcgaggagagttgggcatagactgtatactgtatagtcttatagaggatagatttatgaat

SEQ ID NO: 5650 - DNA, 373 bp, Aspergillus oryzae
cgcacgtcctccatccccaacatcacgctcaacagtccaaactcacctcaatggcaatcgaccacaccactctattcgtccccgaagccaaattccaagaatgcctcaacttctacctttcagccctcaaaccacttggctatgaagttcgccatcaatacggcgagttcgtccgttggactaggatccataaacgaagacctggatagttacaaacgagccgacttctgggtcttcggaacaaagactgtacctgagcgtgctgctcatatcgcatttacctctcacgatcatgcttctgttgacgctttccatgccgcggcgattgaggctggtgggaaggataatggtctgccaaggttaagggagtttt

SEQ ID NO: 5651 - DNA, 465 bp, Aspergillus oryzae
aacgagcaaacgcatgggctgagtgacagtctcttgtccatcttagcgtcacgcagtggtgaaatggtgaactcgatttttggaggcgagtttgcgggaacgacggtgccggacaccactcacatccgcgctatgctctaaaggaaaacatggaaaaaaaaaaaaaaaagaaaaaaagaaaaaactgaacaaggcttttttgagtcgaaggtatcttgagtccgcttcttttgcgcgttttaggcgctaaagaagattattctctaacgaaaggacgagccgaggatcgacagcaggggcaaaatgagagagcaagcctgaaaaagaaaaagaaaagggaaaaagaaaaaaaggcgggaagaaaagggaaccacaccagagcaattattacactggtatacgatgttttattttgctggatacctgttctattattcatagactatatattacggagtactctat

SEQ ID NO: 5652 - DNA, 216 bp, Aspergillus oryzae
tgtgaataaactcgtctttgattacataaaggcagaatttgcgaagctgaacagcaaaaatactttggatgtgtggctgcagcatgatggaaaatggtgggttgctagtccaaaacactggaacttcactgccgcaggcaaggcggtgaagcaggtattcggtgttgagccagatatgacacgtgaaggtggcagcattcctgtcaccctgagctt

SEQ ID NO: 5653 - DNA, 273 bp, Aspergillus oryzae
cggcacgaggatcgacaactccgcgacaacgcgcaattaagcagccatggcccccgttcctcgcgtctactccaagacctacaaggtcccccgtcgtcctttcgagtcggctcgtcttgactcggaattgaagattgtcggcgagtacggcctgcgcaacaagcgtgaggtgtggcgtgtccagctcaccctgtccaagatccgtcgtgctgctcgtgagctgctcaccctcgacgagaaggaccccaagcgtcttttcgaaggtaacgcttt

SEQ ID NO: 5654 - DNA, 407 bp, Aspergillus oryzae
ggttaatcggcggtacagacaggctttcatgatcaaggagaaggaattctatgaccggatcaaacgcttccgtgttgatccctcttcgaactcaatcgcgaaccccgtccccgattactacggcgagaagatcggtagcgtgcagggataccgccagtggctgaaggatcagcgtgtgtataaccgcaagaggcgcaactttatcctctagatatggtcattcttgcatttgtgatggcgaataattaacatgggacccctgtagtctgggtttctcttatggcattttacacttccggtccttatttcctttgtgggtcttgcacacttttcctgtatgactattctgacaatgttgatctgtatctgagcgattactttctttactaaaatttaacctgtatggg

SEQ ID NO: 5655 - DNA, 509 bp, Aspergillus oryzae
gccgcaaaaactgatagctctggtctgcgttgtcgtgtcgcgcaaattaaacctatagccggaagtggatatctcctggtcagcagacgcgacaatttttgatcgcccacgtcaaactattattgaactattcgagtctcggccgttctgtgaagcaatcctctcgttcttgttcgggtttctttcctccgtcgatcgcaccctttttttcaggcctcggtaaagttagctccggtgcgagagcagcttgaaaaagttcgacacgctttttctttttccttttagaaacttcaccttcccacacaacagcaacaacaacaatcctggctgatggctgttcacctgaaatggttgggctgcaacttccatcagacctagtataaacaaacaaatataattgctcaatgatttcatatgctcatactgagcgtgaactaatcactagcaacttgtgtcgcagggatactctgtttggactaacaattaaatgacatgcgaaaaccagggaa

SEQ ID NO: 5656 - DNA, 509 bp, Aspergillus oryzae
  modified_base (363)..(363): n is a, c, g, or t
cggcacgaggggtccggccttctccctgccctcaatcgaggcgcaatgtctcgcaaccatagcctatttttctctggccgtgccgaaggacgcgtgggtgcttgtcgcaagcagcgatccttccgtgtccccaacctgtgaattgcccgctctacgaaatggctcgacatgggtgagccggttccgaaatatcgtggattatctgcgacaatactcgaatggcgagtgggatttagatgcagggttgagcggtctgcaaagggccgacaacattggattctcatccttcgtcgaatcccgcgcccatgctctcgtcgacctctccctctacgtaaccagtcagaactactacaaccagacctnccccgcctacggctccatcctccagtggccgaaccaatggattctccctccaaaaattcacgctgccgcaaaagcccgaacagatcatctcgggctctcgtcactggatctacaagccattgaagatcagcgccaacgcgagcact

SEQ ID NO: 5657 - DNA, 250 bp, Aspergillus oryzae
gttgaaagagtcactgtgcaatactatcggaatcgagatatgattgcggaaaatgatgcgaggaggcggttgacgacgatactgaacaagatggccgctatttagagggatgaaccgggttctcggacctacgaagagggagctatctcagggggttgcacaatactggcgtttaggtgtctttgattacaagctatgggatttctaacgggatgggagcatagacctaataaagctaatttggactggt

SEQ ID NO: 5658 - DNA, 581 bp, Aspergillus oryzae
accccatcttggatttcgaggagtcccgtgagcatcggcgggctgcgagcatcatgcccgataaaaccctcccggagttcttcaccaatctattcgatgaggcgtacttgccggatcttgcggaacgccgatcgccgtatgcatcgcctgttcgggccgcggatgcccttctcgccgatgcccttccccatgatatctttttttacatctgtgaatgggacatgcttcttaacgaaggtcagcaatttgtgcgtcgcttgcaaaatattaacaaacatgtccgcgccatgatgattgagaaagtaccgcatgcctgggacaagtccccgaacccgtggcgagatcaggaacaggtagatattctctatcgcgacgcttgtgccgacatgaaagccatctttaatgcgtagacgttacaccgcggcttacatcactcacatgggccttatcaacggccttgcttttctttttttggattttgatagaagtgcattattggcgtcgggtcaagcgagtttgcgatttccatagtgtacagtactgcgttcaagaacaatgaagacaatccattcaaaactatt

SEQ ID NO: 5659 - DNA, 508 bp, Aspergillus oryzae
agggaaatgggccagactcccattaccccaacggcaaatgcaagggtaaaagcatgtcacaatattaaatctcggttaatgaagagaaaagggtcatcatctccactgagatcccaaacaagaccaaataatgaaaggttctatattctcattgattttgccctttgaaattttggattcccccctctttcttcgattctggaaatgggatgagggcattgttagggctttgtcctccttcaatgtcgtctccatcaatctgccgcatgggtggagtctggcaatttatgtgataatattattatggggatgagaagtatgtggaacactggaacagtcacacgtaccccatagttataccgtctgtctttctatcttggttactcagctcgtgcggcttggactggttcaccgttcctgtggttccacataatggggtagggttcgtgtttgtctctcactgccgctgtcgttgcaacatttatatcacatcttaatacatcctagt

SEQ ID NO: 5660 - DNA, 411 bp, Aspergillus oryzae
caccaacattgtaccctcacaaactcatcttcgcacttagggccaaccaactcttgaacaatatgccttcatacattgttacgtgcaaggaaaacgcatcggctgaggagattgaagagacaaaacaacatgtcagagaccaaggtggtgaaataacacacgagtattcgctcataaaaggctttgcgtgggtgtcctcagtccgtgctctaagagactcagctaatcgtcttccaactattttcacagtgtgacttttcctgatggcgcggtgatgacactcgagtcgcatccacatgtagcatcagttgagccggacggtatcatgtcaacgcaatagacttaaggggagtttggggaagtctctggaagtattgcatatagagggggccaacaaatgatcttggcttg

SEQ ID NO: 5661 - DNA, 267 bp, Aspergillus oryzae
cgagtttccatgtccggcgcactagcagcgccatcagtcgctgctatcccagaaccagaaactcccagcacgaccaaggagccgaaggctgagaaggagaagaaatccaaatcctccaagtctaagaagaaggaaaagaaggagaaatgatctatgaatcgagtttaactctgggcttactccgtctcgattaaattcaattaagttgtgtttgtgtatagaagttagcattccatgttctatattattattactatcacgttgggc

SEQ ID NO: 5662 - DNA, 435 bp, Aspergillus oryzae
cggcacgagggcaaaactggggtctttactagggtgagctggcaaacaggattcttctgattctggagctatgctagaacaggccatgactggtaaagggggaatcgatgtcagaggaccctggatctcttgggggagtatagggtttcattgggcgacaggtcgcctacctttggaacctatcgtcattggggtcggtttaagttttggactttcatcgagagttagagggaatggtgacggcatttacgtttcatgtcggatcgaggcggaagatcgcataggatgatgggccgacgaagttgcacagagcaccgccttgcctgcatgaggcgcttctctgatattttgttgttataggatgtatactatagcaggccagcgctaagaataagtgataggcactgcagaaatgcctgacaactgtttctcaag

SEQ ID NO: 5663 - DNA, 549 bp, Aspergillus oryzae
cctcgtgccgaattcggcacgagggctttgacccctgctgctgccctgagatatgaacggtacgatcgcaaggtgcagcaattaagccaagaggaagcaatgaatttagggctgagagggccagatggggaagagggaatcaaaaggaaccctcgaagacggataattggagatgagagggaagagtactataggctcatggccaaagatttggacaactgggagcagaaaagggtgcaaagatttaagggtgaacctgatgggaaattgtgaattaaccttgttgagtactatcatactacatattcagcattctgattatctcgcctgttggctgtttccgcatttgttcatcacaagagctctgcagctgatcagtttgcttctgtttctatatagatacagtcccctctttcctctcttccacttgctcttgtacttgccaaacagcctttgtgggcctaactatcatgtacacataacaaccgtttcgcatgcactcatttggtggtttccatacataaaagtctgccgcttcttttatagcac

SEQ ID NO: 5664 - DNA, 447 bp, Aspergillus oryzae
aaactttgcaccaaatgatcactaccatcatacctcatagttcaaatcagtcgaatctggatagcattaactttccatatcctcccatctgcaccttccgtcgggtacagcctcactgtctttcttgtggatacttcactccctgtgataggtggtacggagtaagtgctacctcaaaacctaaaccgtcctccaccgggtgtcaaagcccagctgctttctgagattggaccctgttagagtactgtacggagtatccatggaccacaatcctcaactggaaagccatggctgccacatggctgcacggcgcatgcagctcatcattgcctcagaaaggagagcaactccttcccagtactagtcagccgatagcgcgtagaccctgcgtgttgacggatgactagcatgagcctcgatcaccggcaatggttgcctgctgtccat

SEQ ID NO: 5665 - DNA, 525 bp, Aspergillus oryzae
gctcatcggacggtgaaaagtgggcttgtgaagcttgcgtccgcggacaccgtgtgacgacttgtaaacatcatgatcgaccgctaatccgcatcaatcggaaaggtcgacccttctccacctgctccgtatgccacaacactccctgcccaacaccagaagagcataccaagctcaaacgcgaggccgaggccaaatcctcttcaaaaagaggtgccgctagagtctcttcgcgttcgaattctgtcttagttcctattgcgccgagaccctcgtccagttcgccgacgccgagtccccagagtcgtccccagattatggccgcgtcgggtcccgtggtgtccgcgccaccgcagcagcaatcgccgcagcagcagcagccgcagtttcagccggagccgtttgcgcggtcgagtatggcgctgcgttcaccggaggcgagtttgtgacgccggcgttgtgctccatgggtgatgtgcctgtgtcgttgtcgatggttagtccgttggatgcggatccgacggg

SEQ ID NO: 5666 - DNA, 561 bp, Aspergillus oryzae
gcaatctgatttgcaacacttcactcctttccttgattggacaaaatgaaggtcgctatcttctcgactctgttacccctcgtcctggctctcccagccccccagacacagtcaaccgagggaaagttgccttggaagaaaggcagcgtatgcctggcactcacggaggactgtatggggacgattggatggtgtaacgccgaggcgcaacgcctgaaggagttcggcgctcgtgagaagtgcctcgcccaaagagagcgccgtcctgccgacgcacctaaacttccctggatgaaaggtaccggttatgactgtgcctatgctctcactcccgaggagagatgttatggcactgcacttttctgccgtgagggactttacccccagggtcaatatagggacgagcaggaatgcttgtctgacagagaggatgctccgaaagatgccaagaagcagcagagcctcccagaggcagaactgaaggcgaagaagccattccttcagcccgcgcccgacagcgacacttcgtgcatgaccttcgaccgcggcagtgaacgctgt

SEQ ID NO: 5667 - DNA, 302 bp, Aspergillus oryzae
tgagatcgccagaccaaatcaatccacaatatcgcccccagtcttagttcaccagccacctcgcgatggtctaccttgtctccaaccaggatgcctacattttctctgcctgcttatcctattttcccggactttaacgggtacccgcaccgaactcgggcgatagaaaatgatagacctgatgatcacccgactgggtacctggtgttagcatgcttgcctagtctggagccagctcatccctgggctagagatgacactgctggagatttgttgagatcctacaagatgcttgcacattt

SEQ ID NO: 5668 - DNA, 441 bp, Aspergillus oryzae
cctcgtgccgaattcggcacgaggcctccggccccacctctctcttcaccggtgctgccaacaccgtcggccagtccttcggccttgccggtgccgccgccgccgccgctttcttcctggcctaaattcccttcttgtcaatagtgtagccccgattcactcgtgagtccggctccgctgcaggcgggggaatctagtaatggacgttctgtgtgaatgataccagagttggacggggtttgtctttagcttttgtgtggttttggggagagttaataccatttgacttcttatgcttcatatttgactacatactctttatacctcttttttttccttgattatacttcttggtttggcttctggattgcttcgaagttgtgaagcaagtttggtcgctgtttacgatttaatgtaaaccatgacgctttcacctttatc

SEQ ID NO: 5669 - DNA, 526 bp, Aspergillus oryzae
cagaaagggaagaaataaggactatgaactggcgtgtacagtgtctggttgaagccctttccataactgggatacgggctcatctctttccctccttctgttttctctccctccccttttctccttttttctcttacctcaaaacctctctctctctctccctctcttttccttctgacatcagggccacggatcttttctcctatcttgcatttttaactgcacgccttttcagctctcatgtcttttcctcgtcgccattggctcttcttaatacttcatcctcttcctcctcttgttcgtatttaacgtcggttattaaccattatgggcgcacataaatctatttggaccaaaaggctggaatggcgtaattacaaatctatttgaatcccagacctggaattgaaagagaagatgggtgcttcactttgactatagcggcattaagcagaatggcaagatcgccatggttttgaagatctatgtcttagcactgcgttctttcatacctcctgtcgtcctt

SEQ ID NO: 5670 - DNA, 579 bp, Aspergillus oryzae
ctacaacaagaagaacgttgaggaagcttccaaggttgccctgaagaacatctccgttttggagaagcacctcactgccaacaccttcctcgttggcgagcgtatcaccttggctgatattttcgccgcttctctcctcacccgtgccttcgctaccgtgttggacaagaagttccgctctgagaaccctgctgtctctcgttggttccagaccattgtcaaccagccttacttcaaggctgttgttgagaacccagttcttgttgacgagatcatcaagtacacccctcctaagaaggaggagaagcccaagaaggaggctgctcctgccgctgctgccgagcccaagcctgagggtgagcagaagaagcccaagcacccccttgaggctcttggcaagcctgatttcatccttgatgaccttaagcgtacctactccaacgaggacacccgtcccgttgctctcccttggttctggcagaactacaaggccgaggagtactccctgtggaaggttgactacaagtacaatgacgagctcaagctcaccttcatggccaacaacctgatcggtggttt

SEQ ID NO: 5671 - DNA, 529 bp, Aspergillus oryzae
cctcgtgccgaattcggcacgaggcactaagacgcttatcgcagccggtgacggtgtcaacttccccaagaagaatgaaactgtcgccatgcactataggggatatctgtacgaccctagccagcctgataacaagggaaaacagtttgataactcctatgaccggggtcagcccttgaaggtggctattggcacaggacgtgttattaaaggttgggatgagggggtccctcagatgagcctgggagagaaggccctgttgaccatcactccagactacggttatggagcacaggggttccccaatttgatccccgccaactctaccctcctcttcgaggtccagctcgtggctatcaacaacaaggagatgccaaagccctaatcgaatgcctaacctcaccaaagacctagacatataaggcaattgaaaatgatatatcattggtttctcgtagtcgagggttgcagggtaggatggaaagacaagcgagatcaaatatcaagctattgtatgaaaatcagcttt

SEQ ID NO: 5672 - DNA, 521 bp, Aspergillus oryzae
cacgagcgaccgtgaacaacgtgcctctgaacagtttggctcggtgtttgaggagatgctacgcgaagagggcctcgctagtgatgatactgacgctgatggccgtcggcggaccaggcctacatctcgcttctggtctattgttggtggaataagtggtggtgcactcggattcattgtcgccaatgctgccggtgctttcgctggtgccgttgcaggaaatcggctcggcgctgttcgtgatgcgaagggcaaaagtgtctacgaggtcttcctagatcttccacaaggtgaccgtgccaggttattaagcgaattggcagccaaagttttccagtccacagttggacgataactgcatagtggcctcttgttttaatctatgttagtaggcactattattattatttctctctctctctctctctctctccaacagtgtgtgactgatggggaggcattccaggccggaggctctagcgtttaatcaacgtataactcagggatagttatacaatttt

SEQ ID NO: 5673 - DNA, 581 bp, Aspergillus oryzae
cacggcggaccatccgattttccatcctcatcacacagagaaccggcccaccgtcatctttgtcactaacctcgacggacatgttaacgtccacacccttcgattcattcagtctcaaccatgcctctcaaagcaagcggcgagtcgcctacttttatgattccgacgtgggcaactacgcctacgtctccggacaccccatgaagccccaccgcatgaggatggctcacagcctgatcctcaactacggactctacaagaagatggaaatctaccgtgcgaaaccagccacgaaatatgagatgacgcggttccactcagatgaatatatcgactttttgttcaaagtcactcccgacacaatcagcaagcacctgaccgagcaggtgaaatacaatttcaacgacgacaatcccgtctgggatggcctgtctgaattctgcagcatcagcgcgggcggcagtatggaagctgccgccgtctaaataatagaaagtgcgatatagcgatcaactgggccggtggccttcaccatgcaaagaaaagcgaggcgaatggtttctgctatgtgaatgatattg

SEQ ID NO: 5674 - DNA, 390 bp, Aspergillus oryzae
caagaagcccaagagaggcgcacgtggaaagcgagcctctgaaggcgacaagacgacgaaggaagaagcagacgacgagacggcaactccagcaaaacctaaggcaatcaggaggggccgtgcctcgaagaatgacaccgaggacaagaagtcccccgaagcccctgccaaagctgctaagccgactacgaggcgccagcggaagtctattgcgaaagacgaggaagcggagcctgttgtagaagagcctgctgaggaaaagcctgctgaggagaagccgaagcgaggccggcggaagaagactgcttaatagcgccctatcgcaaacgcaaactctcagtcttacctaattctatgcacggtgtcttggtggtctgtgagactttctcg

SEQ ID NO: 5675 - DNA, 423 bp, Aspergillus oryzae
ccccctcgatcagaatccctctctttttactttttcagaccataaatacataaccttccaatcttcagtctacgtgacgcctcaaacatgtcttatgctgaagtagccgccaagggcccggagcaatctgcagaggaggcccgtgccccgagcgttggtgggatctataaggatgaatccgagagcaccgcctcgttagtcgacgtagattcacaacacgtcaccgtcgtggactcgaatttcctggatcaagacatcaagaccactactcaagccgagcggatagagcaggaagagtccgaggaaaataagaaagcgaaggaagagcggaaagctaaggccaaggccaaggctaaggcttctggcgtatgccgcaactcggataatccggtctatatcggcaatgctgtgctcctgagctta

SEQ ID NO: 5676 - DNA, 392 bp, Aspergillus oryzae
cggcacgaggcggcacgaggcagaagtgtgtctattttcctggcccatcttcctcatcacggctttaaccaataaaatggcgtccgcggttatcaaccagattgctatccttactcccaaggagggaaagtttgacgatctcgccgctgaactggccaacatcacccggaacgtgcaagaacacgagcccgagactctggtatactatgcttatgccgatgccaagaaggaagagatcattgtcgttgagagatatgtgaaccaagctgcgttggacaagcaccgggcagcaccttacttccaggatctcatcaagaaggctccggagctgttaggcaaacccttggaactcaaggttggcagtgagttgctccaggaatctgcgcaggttg

SEQ ID NO: 5677 - DNA, 372 bp, Aspergillus oryzae
gattcaaccacagtgcctctcccagccgacggcccaatggcattaaccctacgctcggagctcggcgaagcgacagcgcgattgatgatcgccggaggacatgaaaacgagatcgtcctgttgacagccgaggacactattcggccctcggagatcgtggatatcatcaaccaaacgacaggtcgggaagttaagtttgagcgtgtatctcccgaggggtatatccggatctacggtgaaaatgatcggggcgggaagcccaaggctttctttcagcagactttgacgtggtatgaggggatcgagaagggtgagttggctacgacgcattcattgatgagggaacttttgggtagggagccgacgaagcct

SEQ ID NO: 5678 - DNA, 305 bp, Aspergillus oryzae
cgcctactaataagcaggtggaagttatcctcgttagcattgtcagcctgcgggcgggtagactgtactctgagcatgtatattgggatcaggctagtgttctggtccaggtcggattgctggatccaaagcttgtccctcagggggtacatggagttgatcggttgcctgtagttggacgggaggctgctagacggattttggatgagaatcccgaggttgaaaagaaagagtaccacaaccgattgattcgcagagcgaaagctaagaagaaaggaaaggacggtgtgacgcctggagtagac

SEQ ID NO: 5679 - DNA, 243 bp, Aspergillus oryzae
cctcgtgccgaattcggcacgagggcgtccgccatgcccactgccggaggtctttattggtggacgcattacttcgccggtgagaaatacaagaaggtgttgagctttctggttggatatagcaatacaatggggttgattggaggcatgtgctcggtggattacacactctctctgatgctgctggcttgtgtctctatcactcgcgacgggaactggtcggcctcgaacggcacgatttac

SEQ ID NO: 5680 - DNA, 185 bp, Aspergillus oryzae
gctccccaaagcgctcgcgtctccataacattgattggaagaacatcaacaactgtaaccaagaccacgcccttccccaacagtggcagtatagtggactacacctttctccaaatgcaccacattgaaacccagggatcatgccatgattatcgcatcttccctttctcatttctcatccctgg

SEQ ID NO: 5681 - DNA, 558 bp, Aspergillus oryzae
cgctcgccttcctcatcgacggtggatgtggttcacttcacgcataaggacgtttcgggacaactatctcgggttaaactgcaggcgttgccctccgagtatcctcccattgaccatgctgtcctgaagacgcttttccatcgtccctacttccatatcagtgtggtgagtgatgttgcaggcgtttcccttggcggtgcgctcaaaaatgtcgtcgctattgccgcaggttgggttgaaggcatgggatggggtgacaacgccaaagctgccgtcatgcgagtcgggctgttggagatggtcaagttcggtgaaatgttcttcggtgcgaccatcaacactcggacgttcacagaggaaagtgccggtgttgccgacttgatcactagctgcagtggtggtcgcaacttccgttgtgccaagctgagcattgaaagaaagcagccgatcggaaaggtcgaagagacggagctcaatggtcagaagcttcagggcactttgactgcgattgaagtaaacaaattcttgaagaaccaaggcgttgaagaagaatacccc

SEQ ID NO: 5682 - DNA, 562 bp, Aspergillus oryzae
cgtggaagaagaagcagcgccagcccccaaagcgaagcgccagcgtatcattaagaagggcatcgcaaaggtgatcaagaaagactcgtatgagtatgcccctgtcctgctacgcacgagaaatcaaaatgaacaccgctaatcaagaggccaaatcaatcgcagcagcgaagacaccgttaagtctgagcccagttcctccatggctgaaaccaagggtagcatcaaatcagaggatagttccgtgaaaggagaagatgtttcgatcaaggaggagatgcgaagcattaagcaggaaccggaggatatctacgacgactgtaagaccgaggatgagtcccccatgactaatgaggagctcgatgctcagctcaacgctatgtacgaggccgctcatcctggtatcaaggctgaggctgagggtgatgcttaggtcggcttctcggttcttgctatgatggattccagagcggatggtggagttatctagcaagctggtggttcttttcttattagtaattggctactggtcggtggaagggaaagccagaatttggattgg

SEQ ID NO: 5683 - DNA, 505 bp, Aspergillus oryzae
gacgagtcacagcatgaaaacaagctgcgcgcaacatttgacgggtctgcttcctggtggacgcagggcttaggtcatggtaacccgagtttggctttgtcggctgcatatgccgctggacggtacggacatgtaatgtttccaggaaatatacatgagcccgctttgtcgctggcagaacttctgattgagagcattggcaaccctcgcctccggaaggtgttttacactgacaatggaagtaccggcatggaagtcgctgtgaagatgggtctccgggcggcatgcgaccgttatgggtgggatgccagccaggagcagatcagtatccttggcctcaagggaagctaccatggcgacacgattggagtcatggattgctcggaaccttctactttcaacaagaaagtcgaatggtatcgcggccgaggatactggtttgatttcccgcaagtgaagatgtcgcaaggagtgtggaaggtcgagattcctgagaaccttcggg

SEQ ID NO: 5684 - DNA, 421 bp, Aspergillus oryzae
gccaattgataccctccaaacggtcgctcggaatccggccttgttaccctgtgtttatttgtccttttttgaattccgctccggagaccaggatcttaaagatggctaccgcacaaggtgtcaacgtccttcgctactcggctctcgtagccggtctcttctacggtgcctaccaccaatcctcaatcaccgccagcgcgaagcgtgccgaagccgaccgtgaatacgcccgccaggaacgcctgattcagcaggccaaggccgaatggaagaagaagacagcacccaaggacacacagaacaacggaatcatcacggatcccgaggacagccggttcgaccttgaggcctacctgaagatgaaggccggggagaactagagaaattgggaggtacaaagcggaaggatgagtgacagctg

SEQ ID NO: 5685 - DNA, 539 bp, Aspergillus oryzae
tacacgccaaagtagtcgccatggtatgtttcattttaccaactcaaccactttaatcgcctgagaattttttttctaacgttttgtcgccatgcagtcggacggaaaggacaagagcgcgaaccccatgcgcgagctgcgcatccagaagctcgtgcttaacatcagtgtcggagagtctggtgacagacttacccgtgctgctaaggtgctcgagcagctgagcggtcagactcctgtctacagcaaggcccgctacactgtccgtaccttcggtatccgtcgtaacgaaaagatcgccgtccacgtcaccgtccgtggccccaaggccgaggagatccttgagcgtggcctcaaggtcaaggagtacgagctccgcaagaggaacttctccgagaccggcaacttcggcttcggtatcaacgagcacatcgatcttggtatcaagtacgaccctggcattggtatctacggcatggacttctactgctgcatgacccgccctggtgagcgtgtcgctaagcgtcgccgctgcaagg

SEQ ID NO: 5686 - DNA, 367 bp, Aspergillus oryzae
gaactggtaagctgcaaggccttttcctcggggtgcggggaacgagttccgagagcgtcagagataaataatcgaggaatgtggtctgatgaggggaagatggaggcgcaagatgtatcgccgacggtgcagggttcatgaggagttgcataagcttaggtcactgagcacctgtcagggacgaaaaaacggcttcaccggcacgacggcttgggaaaagatcggacccgagaggcaatagtgttctggggaaggaagattatcaacgaccgactattgcatgatttgagatcatcgccgaatgatcttctgtcattggcaggtcatcccaccggttttagtttggggaaggaagcccttagtctct

SEQ ID NO: 5687 - DNA, 406 bp, Aspergillus oryzae
aatggcccccaagcagaagaccgctgccgctaaggagaacgtcactctcggccctctggccggagatggcaagctcgttttcggcgttgcccgtatcttcgcctccttcaacgataccttcgtccacgtcaccgatctgagtggtcgcgaaaccatctgccgtgtcaccggtggtatgaaggtcaaggctgaccgtgacgagtcttctccttacgctgccatgttggctgctcaggatgttgctgcccgttgcaaggagctcggtatcaacgctctccacatcaagatccgtgctaccggtggtaacggtaccaagacccccggtcccggtgctcagtccgccctccgtgctcttgcccgttccggcatgagaatcggccgtatcgaggacgtcacccccactccc

SEQ ID NO: 5688 - DNA, 433 bp, Aspergillus oryzae
tggaacggttggtggaccttctcccaaaaaccctgcagtgcctggaccggaaaactctatctggccgaatgcggcagaactcaacgatgatcagcgtgatgaggattcctcgcccgcgtcatagcatttttaccacggtatcttatcctcttccgtcagagacgttggattatgacagaggcaacggagaaaaaagcggattatctcagagggttaaaggacgaaaaggctgatcggcttgctcaaataccctctgagtcaatctgtaccaaaacttaggcagatatctgtaacgtaccggtacacacataacaacatctgctattcggtaccgaccatggtcctggtttggttctccagacagaccgcctgcgttcgacttgactgggaccaggtcctaaaggatcaataaaatcacaatccgtttcgattt

SEQ ID NO: 5689 - DNA, 599 bp, Aspergillus oryzae
caaggcggctcctggtctgacaaaaaggacatcgtgtactggcgcggaatcgccagcggcggacgcaatcgtgtcgacacatggacaggctaccagcgccaccgactcgtctccatgctcaacgggacagaagtatccttgacaaacgggtccaaatccgccggtatcaacttccgtcaaccggactaccagtactacaatatctgggccggcttagatggtaccttacctgactatctaaacgaacactgcgacctcggcttcctggacctatgctgttttccccgcgaagacggcaagcactgttcatacaccgacccacattacaagatcgtggaaggcatgcccatgaagaaaatgtaccagttcaagtatctgcccgacatcgacgggaactcgttcagtgggcgttatcgcgcgttcttgttgtcgacttctttgcctatcaaggcgactgtatataaggagtggcatgattcgaggctcattccgtgggcacattttgtgcctatggattcattgtatatggatatctatggcattattcaagtattttattgggtataagggacggaatggacatgatggacaggcggaga

SEQ ID NO: 5690 - DNA, 572 bp, Aspergillus oryzae
gttcatacagcatgcctcaatcattcgctacctttcgcaatcgccgcagcgacgaattggctcgcctagccgatgaacaccttcagcaggacttgcgacaggaagaccgcgatactttgaagtcggctgcttcaaaagtctccttttggactgggattggttccgcagtaggaattggtatgggtctctatgtcgccttcagactgcgcagctcgcgcaaggctttcttcgatgtttttcgcgcgcaggagagacctacacaagtggtcttcgccgatggtcggacagaatctatcccggatattacccccttgctgaagccaaccacgcttggtgatttcgcaacatatttctttgcttctgctggtggactctttttgggtggagagctaggcttcttgggaggagcagctagtggcagtcgcaccatcactgccgacccggagcagaagaagaggattgagaccgctttccggcgattccgggccgatgtactgcgcaaagaagccgacgcgttggatcgcggagtgagcgttgaggataagatgttttgatatcggtgtttgatgtgg

SEQ ID NO: 5691 - DNA, 611 bp, Aspergillus oryzae
tccccctcgggcccctccccttctcacccggccagaacaaacaaggatcagggggatatccatcttacttttccttcgatagatcgatacagaccgagcgtcaaccatggccgacgaacaactgcccgtgctcattataggcgctggtatcagcggcctggtcctagcccaatatctcaaaaccaagggcgtcccgtttcagatcttcgagcgtgactcggcgatcgacgcacggagcggtggatggggtcttactctgcactgggccttgcccgcattgcggcagttgctccctgaggatatcgtcgcgcagatgccagagacgtacgttaacaaggaggctgctgcgcgcggtgataccggtcgctaccagttcttcgatctgaagtccggggaggcgctttataatgttcctgctgcagagcggatccgggttagtcgggtgcgaatgcgtcagttattaacgagtgggattgaagtccagtggaacaaatcccttaaagacatcggatcaagcccagattcagtaacagcccatttcgaagacaactcaacatgcaaaggccgcctcctcctcagctgcgacggatcgcgatccctctcccgacaaa

SEQ ID NO: 5692 - DNA, 95 bp, Aspergillus oryzae
ctcgagaaagaattgtatatttgagtcctctcacctgttttccttgtatgtagatatctatacatctatgcctatacgaacttattctctgaact

SEQ ID NO: 5693 - DNA, 517 bp, Aspergillus oryzae
gcaggaagtgcagcaaggtcacctccaactctcaaaatggcccgccgtcccgctcgttgctaccgctactgcaagaacaagccctaccccaagtcccggttcaaccgtggtgttcccgaccccaagatccgtatcttcgatctgggacgtaagaaggccaacgtcgatgacttccctctctgtgtgcacatggtctccaacgaatatgagcagctttcctctgaggctctcgaagccgcccgtatctgtgccaacaagtacctcgtgaagatcaccggtaaggaaggtttccacatgcgtgtccgtgtgcaccccttccacgtcatccgtatcaacaagatgttgtcgtgcgctggtgccgatcgtcttcagaccggtatgcgtggtgccttcggtaagccccagggtaccgttgcccgtgtgaacatcggccagatcatcctgtccgtccgacccgtgacttcaaccgtgccgccgccatcgaggctcttcggcgttccatgtacaagttccctgg

SEQ ID NO: 5694 - DNA, 576 bp, Aspergillus oryzae
tcaccactgaccctgaagcctcccgcaatcccatccaggaatcctctggaccagtgatcggagactctcttgccgctgaatctgccaccaagggcggcgtttactctcagaaccgtggcgcccagcctctcggtgtgactggccagcagactaccttgaacaccaaggacacatccgctgcctccgagctgccatcggctccagttggtgctgctcgtgagaacctcgacagacaggagaaatatcccgaagctcttggtggccaaggtgacttccctggcccccatctttctacctccggctacgttggtggccctaccggttccaagcagcagcaaggaacccagcagcagtccaatgcctctcagaaccagcagcgtggcaccgccaatgctagtggcagtggctaccagacccggtccaagactagcgccgcaccatcatatgctgaggacgtggtcggtgacttcagcagcaagaagccccacggcaagaacttgcaggagggcggtttcgatgacagcaacaacgcgagcttaccaccgatattggcggcgagaatgaccccggccgtct

SEQ ID NO: 5695 - DNA, 308 bp, Aspergillus oryzae
ggagaagtcatggcagcgcggacatgccgatttgcagttctgggtctagtccatgtggcttactggaaagagagtaggaaggaggatctggaaccggacaatttagtggatgcaagtgcagtacggggaaaccttaagttggcccaatggacgagggtcgtgatagcggactgattgcgtttaatttcattattattaccattacttgaccgtatcgataagtccggatttgcgggaatttcatgcgacccaaggactcgtcctaactcaagaggaaatgatttagggactaaccgaacctgggtttt

SEQ ID NO: 5696 - DNA, 328 bp, Aspergillus oryzae
agggaagcgacacccgacttgacagaagtagaatcggttctgcaccggaaacgtcgtctaacgcagtgggatatcaagcctcctggttacgagaatgtgactgcggagcaggccaagttgtcaggtgagattactttcatatgccctggatccgtgttggatagagaaggtttacttactttgcaggcatgttccctcttcctggtgccccacgacagcaacccatggatcctagtcgcctgcaggctttcatgagccaacccggtgccggaacagcagagagcgcctccttgaaaccattcaactcccgccaggccaagcgcttgtt

SEQ ID NO: 5697 - DNA, 555 bp, Aspergillus oryzae
cggcacgaggcgtttaatatccagacgcattccttcaaaatgggtggccacttggatcctaagaacggagttttcctcggtacctggggtgatttcggttgccctaccccccagcgcatcgcctcctactctctgtctcccaaccgtcagcgccccttggctggtaccacccacgctgctttcttcaacaccttccggagattcagacaccaggttctctacgtcgctcctcctttcatcatcgcctacgccgccatgaactgggctattgagaagaaccactacctcaactccaagcctggtcgccttgctgagggtggtgacgagtaaatggttatttaaatcggtgctatgatttcaaactggaggattaaagagtgggattgcaatgtacagtaactagaagcaatcgaatgcgctgcgtgttccattgtccgacctatgcttcttgggttctactatgctacgacgcgtatgactcctgcgactgtaatccggtgtcatggctctgttcctcgcgcctcagatcagaaatgaatgctatttaatgctcat

SEQ ID NO: 5698 - DNA, 356 bp, Aspergillus oryzae
aatagatgatgaaagcctagcgtgtaatagttgatctatctcttctcatggaaccttgcggctctcctttcggggcttaagggctgtttggatcctgacggagggaggatgataaaggcgttcggcacaacaccttgttacttcgacggacgcgatgcaggcatctctgatacaacacaatacttggcggtgttctactctcacgagcaagttgtgtgtgaatgaccctggaatggcacttgtccttggactgtgccttgatgacagggttctgcacatcgatggcgtgatcccagttacttatattgcttatatacctatgtaccattcgagtactatacaatatgaacatgttc

SEQ ID NO: 5699 - DNA, 330 bp, Aspergillus oryzae
gttataccaaccatagaatacactacgtacgtctttatatcggtttctgcatgagagcaagttcattcagatagtaccgagtataccacggcaataatgtgcggatcggacatcttcctcgcgatcctcgcgatattcttcccaccggtttcagtatggatcaaagtaggcatttgtacagcagattcgatcatcaaccttgccctttgttgtctcggctatgtgccgggcctactacatgcctggtatatcattctcaaatatccagagcaggaccctgatgatccatattacgaaccggttcccggtaacgcccatcgaagggacgtc

SEQ ID NO: 5700 - DNA, 337 bp, Aspergillus oryzae
ctatatcatctgtgatctaccttggaatagattgaatataaagctcacctccacacgttttattttttttatttcgcctttatacatacaaaatgggtctctttgatttcttcaagtcctcaaaggaggaatctccccgtactcaagaaccaacctgggatcctaatactatgactatgcaacaaccgtctagtccttctgctcctgtagttgaccgtgctgtttcggagcaaccgaatacacaggagcagatgcaattgcgtggtggtggtgccggtgattgttgttgtggaatctgtgctggtatcctttgctttgagtgctgtgaggagtgttg

SEQ ID NO: 5701 - DNA, 272 bp, Aspergillus oryzae
tgcctacgagaacgatcactttagatcttttttcaaagacaccaaatacaatccttcaatacaccatgggttctgatcacggttgcagctgtggcgcctcctgccagtgcccctccggccagtgccagtgccccaaataagtgaaacgtcgcttaactcgctgtgggaagatcatgcataacatcggaatcggggttgcagggatggggtttcatttgtgtgcctgagtacagtgataagcttcaaatcaagcaagaataaattgagttgtc

SEQ ID NO: 5702 - DNA, 537 bp, Aspergillus oryzae
cccgccgactactgcttcatgaatcaaactattaacttctcaaccaacatattcccctccatgtccactactaccacctcaaacgatcagcacgattcaaaacgactaaaaacttccccgactaacgagacattcggcaatattgacattatggcggcgggcacttcctccactcaatccaatcccctgtgcgcggtctactctgcccctcagtcgacccagacttttgagcactccatctcctcgcctttgccctccaccgatttatccccagaaaatgtccagactaaggtagcctatttgtctgagctcagaaaattagtgccgaatctgcagaatgatatcaacgtgttcctgacggaacgaatggaggaggataaaaagctcgccgaagcccagggacgtcaactctcagagcaagaacgcaaagaggaggagaactacggagaggaggttgttgaggaggatgcctgaaagtttaactagtctatgaccgaagccttgatgacttccgatcgatactttcgttggaatttt

SEQ ID NO: 5703 - DNA, 567 bp, Aspergillus oryzae
cctcgtgccgaattcggcacgaggagtcaattgtctgctctgtgaacgcaatggctccccacgctaattcggatgttgctgccaatggcgccgtgaacgggtcggctcaatcctctctgtttactgtcaattcccccaatgtcgagtacaccgacaatgagatcaagagcaagtatgcctaccacactaccgacatcactcgtaccgccgacaacaagctggtcgccactcccaaggcgactacctaccactttaaggttgaccgcaaagtgggcaaggttggtatgatgatggtcggctggggtggtaacaacgggtccactgtgacggccggtattattgccaatcgccgtggcctccagtgggagactcgtgagggcatgcgtgctgccaactactacggctctgtcgtcatgagctcgactgtcaagctaggaactgaccccaagaccggtgaggagatcaacattcccttccaggacatgctgccgatggtccaccccaatgatctcgccattggtggatgggacatcagcagcatgaacatcgccgatgccatggaccggg

SEQ ID NO: 5704 - DNA, 534 bp, Aspergillus oryzae
tagttccctattataagagctcatcagaaaacgcccaagatgtgaaatggtggcttcgagatagaaacaccaagtacttagctggaacctgtgcctgtcgatcatgtcgactagccagcggatcccctattcaaacgtgggcatttattccaaaatcaaatattgtcaacgccagtgggtcacctttggtgttcactgaaactacgatgcagcggtatgaaagctcacccgacatctatcgagaattttgcaaccgctgtggtgcgacgatcttttggcactgtaaagaacgaccgctagtaatagacgtgagtgtcgggttacttcattccgacagtggcaccagagctgaagaactattggaatggcatactgagagagtgagctttgcggaaatggcagtggatcagcagttgatgcaacggctggagtctggtttgaaagcgtggtcggagaagcagaagatatgcgaaaaatgagggctctactaatgaaaatcttgcaaatgttcatttggaatctatattcttgtgg

SEQ ID NO: 5705 - DNA, 608 bp, Aspergillus oryzae
gtaaatcggatattccaccccaacattgacgagctttccggatcggtttgcctggatgtcatcaaccaaacatggtcaccgatgtacgacatgatcaacatctttgaggtcttccttccacaactcctgcgctatccgaacccatcggacccgctaaacggtgaagctgccgcaatgctgatgagggaacctaagagttacgaggccaaggtgaaggaatacgtggcaaagtacgctagcaaagaggccgtcgacgatgccggagaagacacagagtctgaagatgaactgagttccgcgggcagctacgaatccggcggggaagaaccagccggtacgatggacgatgtgtaaatgaatttgttctttctagtttccttttccacgtttagggttgcgtgcgatcattcctgaatccgctattcgacattgtgagcgtgactgcctcgcatcagcagcgtcatttctttttcgtctgttcaatgtttcatggggctaggtttgtggcgtttccagggtcggggtctgacattcatggcgcaactgattacggcgactgcgaagactgagtcgaggatcggaccgatgaacaacgcatcgctgagctt

SEQ ID NO: 5706 - DNA, 567 bp, Aspergillus oryzae
accacccgccgtcgacaaccaccaccaccccctcccttcattcttttcagtctccttcgtcccagcagccaatatgtcggagacgaagcagtttggaaagggccagaggaccgtgccggctcagaaggcccagaaatggtaccccgttgatgacgagtcgcagcctaagaaagtccgcaaggctgttcgtcccaccaagctccgggaaagcctccagcccggtactatcttgatcctcctcgccggtcgcttccgtggcaagcgtgttgtcctcctcaagcaccttgaccagggtgtcctcctcgtcaccggccccttcaagatcaacggtgttccccttcgtcgtgtcaacgcccgctatgtgatcgccaccagcacccgcatcgacatcagcggcgtcgacgctcagaccgtcgagaaggtctccactcccgactacttcaccaaggagaagaaggccgagaagaagaccgaggaggctttcttcaagcagggagagaagcccgagaagaagaaggttgccagcgctcgcgccagcgaccagaaggccattgaccagtccatcct

SEQ ID NO: 5707 - DNA, 535 bp, Aspergillus oryzae
cggcacgaggctcagcggtttttgacccggcgcctgccacaggtggccgttcgttataacgccccccgcgccttcttctctcaaggcaggactctcgcggctgcagagcttgatgatcctttgcagaatggtaattaccagaaccctcctcgcgttaagcgtgctttcagagaccctcatggcgactggtgggacaagcaagagagacggaattttggagaaccagtccacgaagaaaacgaaattctcggtgttttcagtcctgaacagtatacgcatgttacgtcccgtaagggcttcttccacctgggcgtgtttgttgcaaccttccttggattttgtggtctcgtgagcttctactatccagacaagcctagtgttcccagaacatacccggaaggcttggagaaggaacttggaggacccaatgctgttaaggcccgcaaatccggcgaggactcttggtgattgattgacgtttgctttttttttttctcctgttgtgtaaataagtacagtacgattctcttttccg

SEQ ID NO: 5708 - DNA, 604 bp, Aspergillus oryzae
catcacgacagcgccggacgacagccatggcacctaaggcggataacaagcaaggcaagacaaagcccagcgaccgcgctggcgctgctgccaaggcagtcctgaagggtgtaggcgcgcacaaggctcgcaaggtccgcacttccaccaccttccaccgccccaagacccttgagctctcccggtcgcccaagtacccccgcaagtcgattcctcatgctcctcgtctcgattctcacaaggtcattctttaccccctcaacaccgagagtgcgatgaagaagattgaggagaacaacactctggttttcattgtggatgtgaaggcgaacaagcgccagatcaaactggctcttaagaagctttacgatgtcgacactgttaaggtcaatactcttgtcaggcccgatggatccaagaaagcctttgctcggctaacccctgatgtggatgctctggacattgcggctaccaagcttgccattgtctagatgaatcaattttttatgggtctggtgaacttgttttgtttaacgcggtagcttataagtcctggtcatacagttagctacccgtgctgcaacgacggctgaatgatcgttat

SEQ ID NO: 5709 - DNA, 468 bp, Aspergillus oryzae
gatttcctggcggcatggaaagatgagagagttggttcaggcgttggggtatgatgatccgcctgagtatcctgaggatcggtttgatttgatctggaccattccgttcccgtatgacaatatcacggacataaggagcgaggactgtccggtgttagatgtgcccgaggaattggcagttgatctctgatgattctttgcctgttgatacaactttttatacccataagtgaggaggtcaggtggttatatgctacatggctggaaccagtagcctaggcttagatgcagtacaggaagcgcatatgagatacgggaaagattctccctacatacatgccactatacctgttatcggataaagtatggaagatacagcagggtgttttcgcttcggagcttgcaaatgcatcataggattggattgaatttatagcggggtgccaattgcgtcatgaatttgtgctg

SEQ ID NO: 5710 - DNA, 633 bp, Aspergillus oryzae
gctactttgctacatccgcccacttcctctggatcggagatcgcacccgtcaactcgacggcgcacatatcgagttcttccgcggcatcgctaaccctatcggcatcaagattggccccagcatgaccccggacgagctcgtgcgcatccttgacgtcgtgaaccccactcgcgagatcggcaaagttacacttatctcccgctatggtgcacagaagatcgcccagcatcttcccggccacatcgccgccgttcaggcctccggccacctgcccgtctggcaatgcgatcccatgcacggcaacacccagtccacgccctccggcgtcaagactcgtcatttcaccgacattctctctgagctgcgtcaagctttggaaatccacaaggcggctggctcgttccttggcggcatgcatcttgagctgaccggcgaggcagtcacggagtgcgttggtggtgccggcggtttgaccgaggagaacttgagtgagcggtacacgacgttctgtgacccccggttgaacgagaagcaggcattggagttggcgttcttagtggctggattttaccgcgagatggacgaaagagacgaattcgatctaatgaagaatatggatactatatctcggg

SEQ ID NO: 5711 - DNA, 578 bp, Aspergillus oryzae
cgccagggtatcgacgtctaccctgttttgtcggaggctgagaagaagaagcgggaggagactggcgagccgatccagagcttgggtaagagcaagaaggcggccaccattgctgtgggtgagactgcggtcagccgtgtgctgaacgcgaccccaatcatggtcgtgccgccgttggttctgctccggctggagaagacggcttggctccaggctcggccccgtatggtgcttccactgaacctgggattgatctttgctacgtccctgtttgccctgccattggcgctgggagccttcccgcagcgccaggccatcagtgcgcaatctttggaggaggagttctggcagaagggtggcaaggacgggatggtcgagttcaaccgggggatgtaaagctttctcgttctgttttgcatgggtgacatttgggacacagctttgtttgctttcttttcttccgtttctattacccttttgatgttggcgcatcatggacagaaaaggttcagtccgtatataccggctatggatagattacatagatatatcactttctcaatgaacggcttatagac

SEQ ID NO: 5712 - DNA, 596 bp, Aspergillus oryzae
gtggtgcagtacgattatgaaagagcggaagacaatgagattgagctcagggaaggtgaatatgtgacggagattgaaatggttgacaaggactggtggttgggttcaaacgctcgtggtgagaggggtctcttcccgagtaactatgttgagctactggaagacaagccgcagaattctacctcgccggacttgcatgagcacaatttggacacaaacattcaagagcctcatgcggaaatagtggcgcctttagcctcgagctcagctaatggacccactgctacagcgttgtatgattatgaagccgcggaagacaacgagcttagttttccggagggagctgagatcactcatatcgaattccccgacgatgactggtggtttggtaaatatcacaataaagaaggcctcttcccagcaaattatgtagaacttcgaaagtgatccaaggtggtgtcttccacaaagacagggtttcgatggcctggaagtctaacgcgttctgcttcctatctttggctgccaactttatttgctaaacctttaggctttttggctgaacatactttgtcacattcatatcagcaagaaaa

SEQ ID NO: 5713 - DNA, 422 bp, Aspergillus oryzae
ccacccctggcatctcccgccagctcgaaggaaaaaaagaaagccacaagtgtactggagtgcttggaaagagaggcaaaagagagtcatcatcatcagcgacggagtgcccccacttaggatcggcccccttatcccctcctcacctgaaacccttctctcttcgcttgtcctcaagttcgctttctttttcatttactcttacaacaactcattctccatccatcatctcgacactccggtcctgtcgttgccgttcggatacctagcctgaggagacttaagatcccatcttgaaccccagtctttcacacaactactgtgggcaataactatcacctggatttctttctttactctctcaactggtgaaaaatcccagagagatcaatcttgtggactcgcttgcacttaacaccttg

SEQ ID NO: 5714 - DNA, 617 bp, Aspergillus oryzae
ggctggcccatttaccccagagcacaaacccaacatctattcgagcgcacgctcaccataatcgcaggaacaatgggatctgtcaaggttaccgacttggacacataccacaatgtagtcagcggagctaattacgcggtcttcaacttccgtgactctcggcgtcgctcgtctgataccgatctggcctacgatgacctcgcctcctatgcatatagtgacaccgtcgcattctatgaagtcgacgtcggcgatcagaagcatatttcagattttgcgaaagtggaacgtcctacactcatcttatacaaggacgggaaagaagtcgagcgttactcgaaacctctgccgaggcaactagagtacctagtctcgagggccttgtgtgggctgactgagattggtggccgtttttaataactgggtggtgacgccggtgggtaatgatgatgtgcacctatgtcctcgaggttgtctatatcttaatgtcttggacatattctacgacgaggcttgaccaggcgttatctttgcccttgagttgagtgggtgcatgctggcataatcctctgtctttcctttctttgcatagctatggatgtctacttgggatggtg

SEQ ID NO: 5715 - DNA, 601 bp, Aspergillus oryzae
tacgcttcccatacaattctcacttccccatacaaaaaagtactacatatccgcatcggccaaatctgccgacctcagaacactgcttttgattttcttctgagtcaattgtcggatcacactcattatgcctaaggaaaagaccacacgtaagaccaagggtacccgcgttgagcgcaagaagaaggaccccaacgcacccaagcgtggtctctccgcgtacatgttcttcgccaacgacaaccgtgagaaggttcgcgaagagaacccgggcatctctttcggtcaggttggcaagatgctcggtgagaagtggaaggccctgagcgaggctgaccgccgtccttatgaggataaggctgctgccgacaagaagcgttacgaagaagagaaggcgcaatacgccgctgccgctgaggaggatgaggatgagtcttcttaaaatgtttcttctcctcgtaggtcttgtgaatcttgaccgactggcgtttcgtgttggttattcccgctaatggcctcacttgtatttgtcgcctcttatatttccttttactcaatgggttctggtatgggatgaccgtggtttctccttgcttttctg

SEQ ID NO: 5716 - DNA, 422 bp, Aspergillus oryzae
  modified_base (333)..(333): n is a, c, g, or t
gcgtccgcgcggctaccatgtcttcctttaatgctcacaacgttgacctcgacacggctagccaggcggacatcctctgctatctggcgctgtccgagaatgactacaacggccacctcggcgcccgcatatcttctatattcgttattttcatcacctcaacctttttcaccgtgttccccgtaattgccaaacgagctccggggttgaagatcccctaccatgtttacctcttcgccagatacttcggcacaggcgtcatagttgctacagcgttcatccacctactggatcccgcatacagcagcatcggcccgaactcatgtatcggantgtccggacactggggagactactcctggtgtggggctatagtcctcgtctccgtcgtaaccatcttcctcttggatttaggccccgaa

SEQ ID NO: 5717 - DNA, 260 bp, Aspergillus oryzae
  modified_base (10)..(10): n is a, c, g, or t
  modified_base (150)..(150): n is a, c, g, or t
  modified_base (152)..(152): n is a, c, g, or t
cccctttaanctgattagaaaaagcctcaatgagaaaagtttcgaatctaaatgatcgctaaaatcaaccctgacctaaacaacagactccaatttctccgttcccttctattgaatagaccaagaaacagatactccaaaggatcgagntnattggcacggttacaaaacaggacgtcaaccaaatgtcccgattccaatcgtacaccaagtcaatcaaaaatataattgcgtggatgttcattgggctggttcggggg

SEQ ID NO: 5718 - DNA, 277 bp, Aspergillus oryzae
  modified_base (7)..(7): n is a, c, g, or t
taaccanctcgcttctcgtcacacttagcaagagacagtaaatggcgtcactgtcagagggatgctcgttttccatgtacactccattgctttctgccctgccacgaaaacgtcgatatcacaggaagtgaacgctaacaatacgagtgtgcgagtatactatgagacacgggtgctctctttccaacaaataatcgccgtaatactttctatctcatagcgccgactggagccggtctgaatgcgcaataccacctctcgggcgtaaacggacaca

SEQ ID NO: 5719 - DNA, 389 bp, Aspergillus oryzae
  modified_base (280)..(280): n is a, c, g, or t
  modified_base (297)..(297): n is a, c, g, or t
  modified_base (328)..(328): n is a, c, g, or t
  modified_base (337)..(337): n is a, c, g, or t
acgcgtccgcctgaacatcatgttcttcagccgtactgttttgcatgaagtaaatcacactccggacgcccttgccccttacgattagaatatgcgcttgcttcacaccttgacctttgaaactagaacttttccggatggcgaaaccccaccgtatgcgattttgtcacacacttgggaggaggaggaagtaacctatgccgacttgcaggatttgcaaggtacccatgccacagagaaaaagggttcgaaaagattagatcaagctgttatacagcanataccaatggcttcgantacatttggattgatacatgctgtattgacnagacatcangaacgctgatctgacggagatagtcggtgccatcaattctatgtatccctgg

SEQ ID NO: 5720 - DNA, 311 bp, Aspergillus oryzae
  modified_base (303)..(303): n is a, c, g, or t
gccagagatgagagacaccacggactcgcaagtggagctcacccaccttgcgcgactgggatcacgagaagaatcacgacaatcacgtcccacggaattatcaccgtagggccgtcgcgggatcgttgggtcgggaggtgtctgcaatactttctttcttttctttatgatggtatagctagaaatataccatgatgtaccgtctgtctttatgcgagcgacgagaaatacgaaatgtacatacaatcctctcatactgctgcttgatctgtagtgtaacgactcgcctggatttaagtctgntggaactg

SEQ ID NO: 5721 - DNA, 310 bp, Aspergillus oryzae
ccctcctctctcatctaaaatcttaatcgtcttgactcagtaattgaacttttgcaccggctgcttatgatactgatagccctcacttacttaacatttctcaatagaaccaaataaatcaagagtcaacttccatgagccgatttatcagctacagagctcgctctacctgagatcatcctcaaaaacctgatacgcagcctgcgtgttcgtcccactgtacattcgtgtctcgggagagacacacagtcagtgacggttcgtgtcattactcgcctcgtctacaggtgtctcgttcacctcgtcactt

SEQ ID NO: 5722 - DNA, 318 bp, Aspergillus oryzae
  modified_base (291)..(291): n is a, c, g, or t
cgagctgggctctttctggtcggctagctgactgcagcactctaagttcaatattctgttgcaatcgtggaattcggagtcggaatcgagaagcagcaattctatgcgtgcaggtgagccgagcgaaacaacatgaaggacatgctcatagactctcattgcaccacttctaaattcggcgggatttgaaatacatacagcctctgtgatctctacttgctgactgatagtcatacgaatggtagtatctatacatataatgtgaccgcccggcgcgttgctgcgaacganacatctgtgatactcagcaagtctcct

SEQ ID NO: 5723 - DNA, 253 bp, Aspergillus oryzae
acgcgtccgcccacgcgtccgcggacgcgtgggctctttcctggtcaggctagctgacttgcaagcactctaagttcaaatattctgtctgcaatcgtggacattctggaggtcgggaatcgagagatgcatgcaattcttattgcggttgccaggttgatgccggatgcggaaaccaactatagaatggaacatggcatcatagaactcttcaactttagcacccactttctaaaaattttctggcggtgga

SEQ ID NO: 5724 - DNA, 201 bp, Aspergillus oryzae
  modified_base (23)..(23): n is a, c, g, or t
  modified_base (34)..(34): n is a, c, g, or t
gaaccttttcccacctggtgagnggggggctccngccagctatacggtctcgtaatggggacatatggtcaccgagagcctgaaaatcagggaagaagactgacgcacgcagataggcgcacgggcgcaaagtgccctcatctagaggtttcgtagaggacaactgtggctctcagaatataaaccgttctgtcactcact

SEQ ID NO: 5725 - DNA, 288 bp, Aspergillus oryzae
  modified_base (111)..(111): n is a, c, g, or t
  modified_base (183)..(183): n is a, c, g, or t
  modified_base (222)..(222): n is a, c, g, or t
  modified_base (236)..(236): n is a, c, g, or t
  modified_base (240)..(240): n is a, c, g, or t
ctggttgcgttacgtccgtgttggtctaacacctcatacccttatctcatcgtgcaaggcttctaacgcattcacttcactcaggacgactcaccctcagcgcaaatcctntcgttgatgggatcatgaaggagatggaacaagtcgactggaaaccgcaacaaaataggggtcatgtcccanctactggtcgcgcccaccgccgtacgcgccctgactgtntggagcgcgtggcnggantttcgcggtactccgagcgcgtactgtgatgtatccgcgtgcagcgtc

SEQ ID NO: 5726 - DNA, 301 bp, Aspergillus oryzae
ccccgtgaaacggaccccttggggaatggaattacctggtttggccgttatcactgtggctaccgttgtcgctttcgttatcgccgaggttatccccttcttcaacgatctgctgtcgatttgctcggccctcttcgtctccggtttcactttttatttcccggcccctgatgtggttcattctcatccgtgagggcaactggaatgagcccaagaacctggccctgggtgctatcaacgtggccgtgttgctcatcggtctcgtcactcttgttggtggcacctactccagtgtcgatga

SEQ ID NO: 5727 - DNA, 330 bp, Aspergillus oryzae
  modified_base (12)..(12): n is a, c, g, or t
  modified_base (25)..(25): n is a, c, g, or t
  modified_base (165)..(165): n is a, c, g, or t
  modified_base (168)..(168): n is a, c, g, or t
  modified_base (177)..(177): n is a, c, g, or t
  modified_base (215)..(215): n is a, c, g, or t
  modified_base (217)..(217): n is a, c, g, or t
  modified_base (247)..(247): n is a, c, g, or t
  modified_base (272)..(272): n is a, c, g, or t
  modified_base (318)..(318): n is a, c, g, or t
gaaccatttcantacataaccgggncaggagaaaccagaagagcgctctgcgcgcgcgagccagctgaggtgacagaaagccagcacccttgagcctggcagctgattctccttgagacttaagcgtactactcaacaggaaccgtccgtgctctccttgtttgncanactacagcnagatatcctgtggaagtgatacagtacagacagctcancnacttatgcaacaactgatcgggttcagctntctgagctcccatactgtcgtgccntcgttacgtacaatacatgttctcgcggtctctgtcgtgtaggatnagctgcttcagt

SEQ ID NO: 5728 - DNA, 206 bp, Aspergillus oryzae
  modified_base (150)..(150): n is a, c, g, or t
  modified_base (156)..(156): n is a, c, g, or t
  modified_base (168)..(168): n is a, c, g, or t
  modified_base (176)..(176): n is a, c, g, or t
  modified_base (184)..(184): n is a, c, g, or t
cgggtagttcgacatgcagaaacgatgcacttgcgtggaaaaaacctgtcaagcagaaggtataaaaagacgttatcttttagaggagatatcgtgaagcacgtcatttcgatagaattggaaatttgtaacgcacctgttaagatgcangatccnaagccgattcanttccttcnactcaaanacaaacaccttctagtcactct

SEQ ID NO: 5729 - DNA, 219 bp, Aspergillus oryzae
  modified_base (21)..(21): n is a, c, g, or t
tccgctttgcagcacatttcnctgaagactcagacacaaccttcgtgtactttctaagagcttcaaagacctacctcagatcacgtactcaaccgtgacatcgaatcttcattttaactctccgagaaccttccttgtcactgcaagagcaattgagactcgcatctttcagtacctcactatgagtgtcgttacaccgttccagttcacagctatcgt

SEQ ID NO: 5730 - DNA, 402 bp, Aspergillus oryzae
tgaacatcatgttcttcagccgtactgttttgcatgaagtaaatcacactccggacgcccttgccccttacgattagaatatgcgcttgcttcacaccttgacctttgaaactagaacttttccggatggcgaaaccccaccgtatgcgattttgtcacacacttgggaggaggaggaagtaacctatgccgacttgcaggatttgcaaggtacccatgccacagagaaaaaggggttcgaaaagattagatcaagctgttatacagcaaataccaatgggcttcgattacatttggattgatacatgctgttattggacaagacatcaaggaacgctgatctgacggagatagtcgggtgccatcaattctatgtttcgctggtacggtgaggctactatt

SEQ ID NO: 5731 - DNA, 333 bp, Aspergillus oryzae
  modified_base (261)..(261): n is a, c, g, or t
  modified_base (277)..(278): n is a, c, g, or t
  modified_base (310)..(310): n is a, c, g, or t
acatttgctcctcatccttccccatttaggctgctgtgaagcgaatccaatcgctgcccagccaggtaccctcttcccttggcgcaaagctatcctcgcgttcagggccgaaactcatcgcgcgccgcctgtatcggtgacgtggtttgccaacagagcaaatagcatcagtcgttccattctaaatccaggacccgctgcgcgccctgaaaacagctaaaaatcatgtcgtcgacctctccttcgaaagaaacctgaaantggaaccctgaagttnnaatcggggtgaagaagccaggaaacaaatggnacaaaggaaacaaacaagaacca

SEQ ID NO: 5732 - DNA, 257 bp, Aspergillus oryzae
cgtcaaaacggctccactacgccggcaccgtcagaatctgcaaagcccttcgacattgtcgcaacttacaatgagctgcttcgctcggatcccgacttgacaatgccaattgctgccatcgaactttggtattactctcacatattttccttcgtcaacgatatcagaaaccctcgatttactcgaaaagtccaccgcccacctgaaaaaaatcaatccctaaacccattggtctctcggctgggaaccgatctctt

SEQ ID NO: 5733 - DNA, 217 bp, Aspergillus oryzae
  modified_base (81)..(81): n is a, c, g, or t
  modified_base (95)..(95): n is a, c, g, or t
  modified_base (119)..(119): n is a, c, g, or t
  modified_base (124)..(124): n is a, c, g, or t
  modified_base (156)..(156): n is a, c, g, or t
aacggaccattaattggtaaaagcccgaaccaacaaaactactatagtaatagtcgtcggagtccttatcgtcaggttccnaacgttattattangccgtatggcagtgataacgcgcngccgngtcattactcgattagtcacaacggtcacaancaagttctgcactgtccgaacccggttggtaacgatcttgcccggtggcataactgtaacg

SEQ ID NO: 5734 - DNA, 367 bp, Aspergillus oryzae
  modified_base (10)..(10): n is a, c, g, or t
  modified_base (16)..(16): n is a, c, g, or t
  modified_base (25)..(25): n is a, c, g, or t
ttttttcaantcgttnctttatctncgttctttatctcgttctgtaataacagccatattgctaacgccgtgtaccagtcggataatcaaagtcggaaccacatggttaatggtagtaacaaccgtccagataattttaacactcggttgggtcgttttagtgttccgggtaatccgcataatagcaggcaccttgttattaatgcttttgccgataaccctgcccacaaccacattaacctgcctaacgttattccgaacatttggtgtcaccttagtcagcttagtccacttttttcgttcgtttattcataacttgtgttcgtggttttgttaaccagcgtgataaacagtgtgccgagtccga

SEQ ID NO: 5735 - DNA, 319 bp, Aspergillus oryzae
  modified_base (98)..(98): n is a, c, g, or t
  modified_base (117)..(117): n is a, c, g, or t
  modified_base (316)..(316): n is a, c, g, or t
aatgtgcagacatcataagggagagagctgtactagcgtccttagtggcatgatgtggccgtggtacctgttgtttcccccataccttgttaattagnttcgcctggagtgctgccngaatgcctgtagagtagggcctcgagggactatctcctcccacaacggcaactgtccgagtcagtataattaccttttgtctcaacattggcttaaagggccacacctacttcgataagtacctaacagtatatcctaaattggcaagtcatgtaacttcctaccaacttagtagcctttaaggtactcccactgaggnttt

SEQ ID NO: 5736 - DNA, 335 bp, Aspergillus oryzae
aagaggggtgggggtggggcgctggggtagatttagggctatggacggtaccggtgatgataacagccgaggtccatctaacaaccatcatcatcaggttgtgaattcttcgctttgtggtcctgtgaccgtcaacaataacacttttctcttttttcttaatttggatctaaactttagtttgattcatttggatatgaaacttaacaggaagcttccacgactgttgggattacgccctcaataattattgctgtataatatttttctacctccaaatcggttgccccagaataactgttaaccaccggagctgtttaataacgggcgcaatt

SEQ ID NO: 5737 - DNA, 416 bp, Aspergillus oryzae
cttcatctcgttcgggtggtggatggtggtgatttaattattttacgtaggtcggtacatagttatcgttatggtcggggggtagtggtgagatggaggggtgcgaaggcgggcattcgaacacctgttgggtccgtagagaggaaagagatggtacatccagtgtcttaggtggggtcacttcgtctaagtaatgttacgtcgggcagaaagtaagtacgggtaggggtaagagcaacccggttcttaggctcatactttgtattggcccgctggttatgctttgtcttctgttggttagtaacctctcgcatcagcgcattctgcgtattcgcaacccgaagcttggtggtaacccgcagcactcgggtgatagctcgccgcgtcaagataatttccgccgttgttaaatgcct

SEQ ID NO: 5738 - DNA, 348 bp, Aspergillus oryzae
  modified_base (11)..(11): n is a, c, g, or t
tctattcgttnctgctgttaggtggttgtcgagttgtgttgttgttgaaattgttgtttgtattgggtatagtattgtttattagcctcctgttcgggtcgtacttgcaccacctccgtcagcatattcacggtagtcagcattattagcaatattgttcgcagattcgctattagtccggctctcttaaggttgttaggagctatggttacaacagttgtcgtcttaattcgccgcacagttttaggtcgagtggtacaatcctttatcactgcgtaggctacatccggctgagtgatgtgtagcaccagtcatgcgtaagctattcgtaaaacctttcagccacct

SEQ ID NO: 5739 - DNA, 360 bp, Aspergillus oryzae
attgatcaccgggtacgtggggggagggtttattaaaattataagtaagtaaacgatgagttcgatgttaatacaaagttggtattagcgtggtgctcaaacgggatcgtccaaattgggttgccaatattaagcagcacgtgtgttcgtacatgggtgtccacgggcctaatcggggccatctgagtcgtagcaaacattctcacattccttctactaccccagggcctggtcgtattggggttctgtaaatccaactgcagctgcttaggccaccatgtaatcactaccactgtcagccgtcttcgaggacccgtaatggccttaatctgacatttacttccctccagttttcgaatg

SEQ ID NO: 5740 - DNA, 347 bp, Aspergillus oryzae
  modified_base (7)..(7): n is a, c, g, or t
tgtacanatcctgacttacctccatagttgtgctgagtgcctctgcgttcacaagcatgataatccttattgtcctctttctagagtggtgagaggtcggaggggtagtattgtaattgggggtattcgcggttttcgaaggcttaaatcactgttccccggcaacagttttgattagcgggattgtggtcttacagatggtcctatacctcgtagacggctgatactcggtagttattgatgccagtttctagatactactagtcctttcaatgtagcgagttccacgcgttccatatgccccacatgatgttgccgcgctcctggagacgttgtccgtgtttcgt

SEQ ID NO: 5741 - DNA, 363 bp, Aspergillus oryzae
cagatggtaactcttattatttatattttaattccctgctgctcccgctagagcctcggttggagtggtatccatactttctgtttcttttgcgactgtacttgcttagctatgagccgccgctattgtacttcgagctgcctctccctttgtattacttgcttttggagcctcttttttacctgctgtttctatctccgccgttcatgttccgtcttttgcggcctccactgagctttccgtaattatgcatgtactacagtgagagttttaatcatagccgcccgctgaggagtcctaacccgccgctgaacagtaatcacagttcgtattgggacgcctacgcgcagtaacagtaatcac

SEQ ID NO: 5742 - DNA, 333 bp, Aspergillus oryzae
  modified_base (279)..(279): n is a, c, g, or t
ttatctcgttcggggggggggggggggggggggtccgcgataagactagaaggaaggtacgcagtaacaagtcgaaagataacaatacaaacaaacataactaaggtaatcttttccctctcttctaatcaaggcccgagctactctaaaagcagtaaaattgatataatcaaatcatcatggtagtaaagaccccttgaggagtagtttgcttccgtattaaatcttttaaattgcgctacagctcctacatcgactcaataatgcactaaaatcggnacaagagttagaggcaagttcaagtcaacaacaaccactagtactcccaacagg

SEQ ID NO: 5743 - DNA, 443 bp, Aspergillus oryzae
  modified_base (348)..(348): n is a, c, g, or t
cgacggtatcgataagcttgatatcgaattcggcacgaggaagaagccgactcaattggtcgtcagccctggtccgggccacccgacaaccgacgctggaatcagtaatgctgcaattcaatacttcagcggtaaagtacctgtttttggtgtgtgtatgggtcagcaatgcatcatctcttccttcggtggcaaagtcgatgtcacaggcgagatcttgcatggtaagacatcggtgataaaacatgacggttagggtgcatatgaagggctgccgacctccctcgccgtgactaggtatcattcccttgctggaacacactcaacatccctgattgcctggaggtnacgtcttacgcccagctgggtgaggacagtagtagaccgttatcatggtgtgagacacaaggagcttgcagtggaaagtgtccattttcatcctg

SEQ ID NO: 5744 - DNA, 428 bp, Aspergillus oryzae
acggtatcgttaagcttgatatcgaattcggcacgaggctgccttatcccctacctgtcggagttgaatagattctcaatatctacggcatgttctattagagttttaaatcctatcttttacccccatcaatccagaatggcaaaaggaccgcccgcatcctcttccccggccgcaacgcctccctccggagtgctgaaacgaactacttctagcactcagaacatgaagaaccagaagtcaattctaggtttctttcagaagtcatcaccatccactccatctactgctcgcaatgctgaaccagcttcgtcgcctgctcagagagtatcggagcagcgcggggctgccagagggtccgtgaagagcgacaagaagaagagtctcccacagctctcggacttagcccggtacaagtagtgatctat

SEQ ID NO: 5745 - DNA, 420 bp, Aspergillus oryzae
ttcggcacaaggtaaaaaggtattcacgcactgcccgatatgcggtggagcgcagccaacatagtctcacgttgcaacttgcgcaaagccgtattatcatgagtctctggttttacgctatcggtgcacttgtgaagtcgtgggatgcagcaggtgcagccgtccgaaccgtgtgcgggttacgatataatgtcgagtcaggtggagtcatcgtggaccaaactcaacaaacttgcgaatacggtctacacccgcaagcgttgattgagtgccgccggaggacgttctggattgcgtttatgatggatcgcctgtcctccttttacaccccctcctcgacctttatttcttcccaatcagcctacctcagactcccctgccgagaagaagtctacgaagcccaacaatataccaccgtgc

SEQ ID NO: 5746 - DNA, 297 bp, Aspergillus oryzae
  modified_base (138)..(138): n is a, c, g, or t
  modified_base (140)..(140): n is a, c, g, or t
  modified_base (142)..(142): n is a, c, g, or t
ccgaattcggcacgaggcgaccacctccaatcaaccgacgaactagataacaccttcatcctgttcatgtccgacaacggcgccgagggcgcaatgctcgaagccctacccgtcatgggaccctcgggcaacatgaanancntcatcgacaagtattacgacaactcactcgagaatataggcaacccagactcattcgtctggcacggtcccgcgtgggctagtgccgctatggctccttcgcgcggattcaaaacctggatcacggagggtggcatccggtgtccgtgtgtggtt

SEQ ID NO: 5747 - DNA, 517 bp, Aspergillus oryzae
  modified_base (399)..(399): n is a, c, g, or t
  modified_base (437)..(437): n is a, c, g, or t
  modified_base (464)..(464): n is a, c, g, or t
  modified_base (473)..(473): n is a, c, g, or t
cgaattcggcacgaggagctacctaaactactgtgttagatctgtttttcctaccgcaaggtaccctcttatcgtcatctcgtcctgccatcataagcacccccttgttacatctcatttagagtcgaagtgattcaagatgagagtattgccggctactttgctggttggagctgcctctgcggccgttccacctcttcagcaggtgctgggtcgacctgaggagggcatgagcttctccaagccactccatgccttccaagagcagctcaagactctttcagaggacgctcgtaaactctgggatgaagttgccaactacttcccggacagcatggaccacagccccatctttctctcttcccaagaagcacacccgtcgttccgggattctcattngggaaccacattgtccgtggttctgaatgtccaagaanatctgggtgaacaaaggccgaacgganaagaagganagagagattgatggaaagcttgaagcttacattctcaggatcaa

SEQ ID NO: 5748 - DNA, 448 bp, Aspergillus oryzae
cggcacgaggtcttattacttcgaccactttcccttcttctcttcttcttctttttatcctttgattttccttccgctctttcagctggcccttccaccagcttcattttcttttctcttcccccctactttatcaagtatttggaagctggaaagtcacaatgagcggacttcgcttccttgatctaatcaagccctttacgcccctcctcccggaggtggcagctcctgagaccaaggtgcccttcaaccagaagttgatgtggactgggttgacactcctgatcttcttggtcatgagccagatgcctctctatggtattgtctcctctgacacttcccgatcccctgtactggctgcgtatgatgttggccagtaaaccgtggtaccctgaatggaattgggtatcactcccatcatctcctccggcatggttttccactcctc

SEQ ID NO: 5749 - DNA, 395 bp, Aspergillus oryzae
ccgaattcggcacgaggcgccaaaccagctgacaagaacaactcaaacacgccatccctagcaagtcgcatccaaagctcagcctcaggattagcccgacaagctttcttcgcacccggttcatcagacgatgcagcacagtttctcacaccaggtagcaaagccggtaccacaaccacatcctcatcctcagccctagcagccgcagaacaatacaatcaagtttccggaccctccgcgccatcatcggcgggggctcaattgcgtgatagcaatgcggggacattccgctcaacaactacaccccagcagggcgggttcgagattcccccaattaacagaggaggagtttcgcacaagcaggaaacgatttccctagagccatctgcatccac

SEQ ID NO: 5750 - DNA, 391 bp, Aspergillus oryzae
aattcggcacgaggaaggtacctaaggttattgctgcgacattgactggcttgagaacaatctatcacaacttcggatgcaaaattgttgatcccaaaccggtccttaaggccctgcccaaggtcttcggacatgcagacaagaatgttcgcgcggaagcgcaaagtctcacagtggaaatgtaccggtggttgaaagaggccattaaacctcttttctgggccgaactaaagccggtccagcaaaccgacttagagaaactcttcgaaaatgtcaaacaagagccgccaccgaagcaagagagattaactagagcccagcaagacgcaatggctaccgccagcgcagcccctgaagatggtgaagccgaaagacgtggtgaaagatttac

SEQ ID NO: 5751 - DNA, 416 bp, Aspergillus oryzae
ggcacgagggtaccgcgactcatatctgttgttcaacaaaaatcgatctctgcacaagattatcgccacgcagatcgaaaaagatgatttgattcagcaagacatccttccatattcctaccggtcacgtcaaattgccattgtgaccgcaagatcgatgttccgtcagtttggcagtcgagtaattgtgaacggacggcgagtgcgtgatgattattgggagggcaaggcccggaaacagggcttcaccgaagacgacctggcgggcgagaaacgccccggaggggccaaagctcgcgatgcagccgcctgcggaaagcggcgagtggctgccagccttcctgccagcccctggcccatggcgattttcatctatagcaatgcactttgaggcttatgcccaacagcttacctat

SEQ ID NO: 5752 - DNA, 380 bp, Aspergillus oryzae
ctcaaggtctacggtatcgataagcttgaggtcgaattcggcacgaggcgaaaaggtgcttgtggggattgtcgctgttcagccagcaacaggtgacatagtgtatgatgagtttgaagacgggttcatgagaagcgagattgaaactagactcctccatctggcgccttgtgaggttcttatagttggtgatttatcaaaagccacggaaaagcttgttcaacatctttctggtaacaagactaatgcttttggtgacgagattcgtgttgagagggctcctaaagcgaaaacggcggcagctgagtcacatagccatgttttcgagcttttacgcggagaggatgaaagaagtaaacgccacaaatgatgttacaggc

SEQ ID NO: 5753 - DNA, 377 bp, Aspergillus oryzae
gtcgaattcggcacgaggcctcgtgccgccaaattcagaatggatgcggactatccaactggggacctaacgtcccatgacgcgattctgcctcttacttgttctccacgtctaatcatcgtgaactgagtcataacaaggtcgcgagaaagggtggatttaaatacgagcagtatacgttagggatcttttggtttttttctcagcatgttgtatagacgcacactaaatcaaagaacaattactttcccacaaaatcgcttatttacggaattttaatacttcttcatttgacacacctattcatatttgtgactatgacacgcaaccgattttcttcattcgtgggaagcagttccaacgggccctcgtttcta

SEQ ID NO: 5754 - DNA, 480 bp, Aspergillus oryzae
  modified_base (364)..(364): n is a, c, g, or t
cgacggtatcgataagcttgatgtcgaattcggcacgaggcctcgtgccggaggattgctggctaggagataacactgtctccttgcctgatctcgataccaccaaggatgtggtcaagaatgaatggtacgactgggtgggatcattggtatcgaactactccattgacggcctccgtatcgacacagtaaaacacgtccagaaggacttctggcccgggtacaacaaagccgcaggcgtgtactgtatcggcgaggtgctcgacggtgattccggccttacacttgtccctaccagaaacgttcatggacggcgttactgaactatcccatttactatccacttccttcaacgcctttcaantcaaccttccgggcagcatggaacaaacttcttacaaacatgattcaacaaccgttcaaatccgaatgtttcagaattcaacacttcctggggcacattcgtttgaaaaaccacga

SEQ ID NO: 5755 - DNA, 328 bp, Aspergillus oryzae
atcgataagcttgatatcgaattcggcacgagggttcgtcttctcctaccaaaaatgaagcgcaaatcatctcatcattcgatacgcaaccggcgccagagaacgccggggtacctacatcgcaaccacggacattaactcgcgaagaacgagcagatgcggagttgaagcaattgctagccagcttggagggagacatcaataaaggacatgaggcatcgcaagggtcaccgtcctccgcagagtccacatcattacccccgtcatccatagcgccggaatctctctaccccgatacaatgtcctgtcgttctgcgttcggactacc

SEQ ID NO: 5756 - DNA, 463 bp, Aspergillus oryzae
tcgacggtatcgataagcttgatatcgaattcggcacgaggcgtgaatctactccgcataggtggatttatgtaggcgaaagccagctcccaggaatcctgcaccttctcaacagtctgtaagctttcattttcgttaatgaaggctgtcgattacgaggaggatcttgtctcgggaaggcttccaggactctctgtttcatgcagtgtgtatgagtcggtagcgtcattcgtttatattaaccagctcgttcgatcctttcctttcgtttggcttcttctgtcaatcttttgtctctacgtctggatgtctcttgtgtcattcctggccaagttcatgggcatggacgataggctgaaaaccgctaatcgctcgttcactcgaagcgatcgagttcggcaagcctagaaggtcgcccaaggaagacacataaggcatgtgaaggcaaaaaaaagcaagagaa

SEQ ID NO: 5757 - DNA, 402 bp, Aspergillus oryzae
atcccgaaatcggcacgaggctgtcttcgtatattccctggtatcaagccagaaatgattgatgccgtgttgagactagacggactccgtggtttagtgttagagacctttggagctggtaacgcaccacacggtcaagataacgctttgattaaagtgcttgcggatgccatcaagcgagggattgtgattgttaacgttactcaatgtttgactggcagcgttagcccggtatatgccaccggtatgagcttgtctcgggctggtgttgtcgcaggtctcgacttaactacggaagccgccctaacaaaactggcgtatctccttggtctaccagacgcaaccccggagttccgtggccacgggacatgttcgaaatcactcccgaggagaattgacgga

SEQ ID NO: 5758 - DNA, 509 bp, Aspergillus oryzae
  modified_base (23)..(23): n is a, c, g, or t
  modified_base (369)..(369): n is a, c, g, or t
  modified_base (440)..(440): n is a, c, g, or t
  modified_base (472)..(472): n is a, c, g, or t
ctacggtatcgataagcttgatntcgaattcggcacgagggaggcctgttacccagccaagacccggaatcgttgctgtccacgataaacacctcgatagtaaagaaaagaagaaaagaagaaaaacatccccacaaacccgatcgactttccatcacgacccccaactccttcctccctgttgcctatcggtggccccccatcatacgaggaattccgttcccctgaatctataccgaccgtctgtataaaatttccccaaaccatattgagaacggtcagcgttacgactgagctcccctaaacggttttcgagctcgttcacgttccgtggcttcggaaagttgcgaggacatttgccagctttangaaatttcgtggcggtgcgttttcgccccgcatgggttcaatcttatggcgtggttttaatggcggaatcntttcacggtggttttaaggtggaacaagaggnttctggtttaatttgaaacgattttaaccctagaata

SEQ ID NO: 5759 - DNA, 442 bp, Aspergillus oryzae
  modified_base (395)..(395): n is a, c, g, or t
  modified_base (419)..(419): n is a, c, g, or t
aggtctacggtatcgataagcttgatggcgaattcggcacgaggaccgcctttgaaatacgaatcgctccaggcactcgcccttctttgtttatggccagcggcgggtcagaaggagttccccatagatggctggttactgagcgggactgcaatcaatcatgccctcgtctcctttgacttcctcaatcatgtgccttcagagcttctcattgataacgatatcgccgctcaattgcggctctggaacgctttctgtttaacacagttacatttcgctgttggcaacgcacgttccattccatttaccacagagatatctcgattattgcccacgacttcttgagcaccccgcttgcaacagttgaggatgggcaaggttcgtaagccaaaatnccagttgttacttgattcacattngcgacttcccaagcccaacaagc

SEQ ID NO: 5760 - DNA, 445 bp, Aspergillus oryzae
  modified_base (388)..(388): n is a, c, g, or t
aggtctacggtatcgataagcttgatggcgaattcggcacgaggggcgtgctttgcaaacattgtggagtatggaacatgcaactatgtctctcaacgagccgtcaaccatcctacattggataggacaggccgtgtccggatggatattccggtagagttcgacttgaacgatctcatatctttcctcggtgaacggcaaggacgattcaacatccgtgccagccaagcctggggttctctatatgttcttgacctgggagaaacttacaaattcctgaggagcttgagcgattataatggcaactctcggtcgaaacttccttcgagttcatcgaaccgacgggatagttcgaatccgaaagataagttcgaaaaactggctgaanctggtggttcaaagactggtgaaccccagttggaaacattttctatacctttactcc

SEQ ID NO: 5761 - DNA, 498 bp, Aspergillus oryzae
ccctcaaggtctacggtatcgataagcttgatggcgaattcggcacgaggggcctgtggaatttccgtctctatcttcagccgtcaatacaccaagcgtgccaccttcgcgagcctccagtcgtatgggtgaaacagtttgctccgccgcaaatacggaatggcgtatctcagattttgtcttcggcgatcacaagtcgattgaaatcacaacaagcgcattggacgtctcgacatatgctgtactgactcctgacgaggatcctctcctcggaatgtccggaagctcgacactttcctccggtctgtcgtctccaatgccgcacatgaagcagccctcggcaaattcagaaattcccggccaacgtgggcgctacatggctgttgggactgctaccggaagggtctttgtctgggatatgcgcgctcccacggcgaaaaactcggagattatcaactccgtcaatcgattccgcatcatcccaaatgatctcctcaa

SEQ ID NO: 5762 - DNA, 302 bp, Aspergillus oryzae
  modified_base (24)..(24): n is a, c, g, or t
cggtatcgataaggttgcatatcnaattcggcacgagggattatctgctctgatacactccacggaggttactactattactatgaatattctccattctactctctccacttggagagaccgtcttgccccagtgtcccgcacctccactttccgcaacaccggccagatcactcccgaggaattcgttctcgcaggcgactaccttgtctacaaattcccatcgtggtcatgggccgacgcatctaaccccgcaaagcgcgtttcctacctgccccctggtaaacagtttctcgttaccc

SEQ ID NO: 5763 - DNA, 437 bp, Aspergillus oryzae
tatcgataagcttgatatcgaattcggcacgaggcaaacccgtccaaataccatttaatcatgcaacgatctaccaaggacgtgatcctctcacgtagacagatcgaagccctaattgcagaggggcaatcgattattatcgtgaaccagaaggttcttcgtgtggatgcctggattccgtatcatcctggcggacagaaggttatccagcatgttgttgggaaggatgcgacggatgagttcactatgttagtttgaattcgctgttctagttggatgcgagtgagcgtgttggctcgatgctgacgggctgtagattccactgtgaagagacgcgacagatgagtgagaggtaccaaattggtcggattgagggaagatgggcgaatttcgtgccacctattcaaggaggagtttttcggtcggaggacgaagaa

SEQ ID NO: 5764 - DNA, 299 bp, Aspergillus oryzae
tatcaaattcggcacgaggcaagatcccaaagtcaaaatgtcgatccccgagatgcagtgggctcaagtggccgagcagaagggcgttccgctcatctacaagcagattcccgttcctaaaccaggaccagatgagattcttgtcaaggttcgctactcgggcgtctgccacaccgaccttcacgccttgaagggtgactggcccctcccagtgaagatgcccctcgtaggtggacacgagggaagctggtgtggtcgtcgccagggggttgacctggttaactgaatttcgagattgg

SEQ ID NO: 5765 - DNA, 430 bp, Aspergillus oryzae
agttcgacggtatcgataagcttgataccgaattcggcacgaggcgaagatccctctgagcaccaggatcaggtgagatataactaccttcaaacagtattaagctctccgctccctgaaggctcagctgaagctgtttccgaatcgccacgtgatgctgcgaagcccaccccaactgagcccgaccccaagcaatggtctaatacgggtgtcgtagcccccgagccacattaccaagacttcagtctgagccaggataatctcagcacccccgtggttctcgccataagttctcccacgggtgttcttcctgcattgaactgcaatcattgtggtttatctattcccaaatgaacactaccactgcagtattctgcgaatgatggtgatttatgacctatgccttcatttgttgtagaactcggagttt

SEQ ID NO: 5766 - DNA, 237 bp, Aspergillus oryzae
gtatcgataagcttgatatcgaattcggcacgaggctattactacggtagtgaggttataactacgatccaggaagtttctccgacggccacttccttgcccgaggcagtctcgactatcacctccatcgggcaccggatactatggaggaagatgctaccgtcatccagaagctgtatcccaccggcgtaggagagtctctcgatgactacgatcgttacccctcctaccgcgata

SEQ ID NO: 5767 - DNA, 276 bp, Aspergillus oryzae
  modified_base (177)..(177): n is a, c, g, or t
  modified_base (196)..(196): n is a, c, g, or t
aagccaccaagcccgaggattggcttgaggaggagcccaccagcatccccgaccccgaggccgagaagcctgaggactgggacgatgaggaggatggcgattggattccccccactgttcccaaccctaagtgtaatgacgtctctgggctgtggcccctggagcgctccgatgaanaaagaaccctgcctacaangggccaagttggactgctccctatgatcgacaaccccgcctaacaagggcccctgggctcccccgcaagatcgccaaccc

SEQ ID NO: 5768 - DNA, 337 bp, Aspergillus oryzae
  modified_base (306)..(306): n is a, c, g, or t
gacggtatcgatgagcttgatatcgaattcggcacgaggcttttctcgtccccggaatacgctcgagctgtgtttaaaaaactggatatcgatcgtgggatatcacattataagatggatcctgctttcttcggtacataccccgaactctatgacccaagcgttgatattgcagcgaagggcattccacttagaccggatgtacaattgcgcttgacgtatcctaagcctcttgattcttcgacgtttcaaacttaccggagctttatggacttttctctgtatgctccgttaagtgtggcgcanggttttaggtgactgtacatttcgccctaga

SEQ ID NO: 5769 - DNA, 411 bp, Aspergillus oryzae
ggtatcgataagcttgatatcgaattcggcacgaggcacaaaccaaaatggcctcaatacaatccatccgacgccccttggcaaccctcacctcccgcaccacaaagcaaatctccgcccccgcgacaatcagatccgcattccgcaccgtcccagaaataacccgagccttcggaacagcaccatcaccatgtctcgctcgcgggatcccctccgtacgtcgcatgaaggtggctctagcccaacagagcttccgccggtggaaaagtgaggtgaaccacattcagacaatgggggtttgaagagttaacgcgccctccaaactcaccggaacaagcccaaaagaactcatcttgttgactgcggagccgcgagtgattctacggtatatccgtcgtgttcgtgcccttg

SEQ ID NO: 5770 - DNA, 356 bp, Aspergillus oryzae
agggcggactgtcgtccagctcctcagcctcagctgcagccactgccacggccgaagtctcttctgctgtgaataaagtcgttcctagctctggactggcgaatttctatcgtggattcacgcctaccctcatgggaatgcttccatatgcgggagtgtctttccttacgcatgacaccgttggtgattggcttcggtcaccggcactctctcaatatacaactattccgggatctgaatctcagtccaagaaaggttcacatcgcactcaactgaccgccgcggcggaacttttctctggggcccgttgccggccttgtctctcagacgtcatcatacccgcttggaagtcattc

SEQ ID NO: 5771 - DNA, 326 bp, Aspergillus oryzae
ttcggcacgaggcgcgaagtcccatccccatcatcatcatcatggttcaagtaaaggaatttgccgtggagcagtggatggataaatatgaacaacatgccaagtacaacatagcagagacatgctgtgcctccatttcagtgaacgatctccaagagctttccgaggataaatctttgagcccattagatctctctaccaaactcacgtatggtgctattcgaggttcggaacggcttcggaggaccttggccaatctctactcggtcaaaacaccgacccaattgccttctgataacgtttttaattacgccgggtgctattca

SEQ ID NO: 5772 - DNA, 524 bp, Aspergillus oryzae
tcgacggtatcgataagcttgatatcgaattcggcacgaggcttcaactactactcgtcctcggcccaggtgtcctaccgcttggctttcctttcggcggctgcgacatatggtatcgtggtgtacaagggacatattgcccgtggtcgtcttcagggtagcgttccgaacattgcggtgaagctcgctggtgatgaaaatgtccagtatcttggtgagtagaattgccaggtggtcaaatccaaccagcatgggctgaccataaatcaggaatggcgattgtctggctctattcccgccaggtcccattggccctcctcccctttagcgtctactcgatcttccacgttgcgacatactctcgcgcccacctgatccccactttgcagcctcccgcccagggcgccggatccgcgtcgccctcctctcctggtgctgccaagcccgctgccagtcctttgggcagaaaacattggaagatttgtcaagcagtattacgaatgccagcatggattctcgtccct

SEQ ID NO: 5773 - DNA, 301 bp, Aspergillus oryzae
tcgataagcttgcatatcgaattcggaacgaggcagccgaatacctggagggacatgccggggtggcagacacccaggatgtagacataagcgcattgcgtcgcaagatcgattaccgcattatcccgttcatgttctgttgctacgtgctgcagtttctggataaagtgatgctgaactatgctgcggttatggggataaagaaagatctcgggttagtgggcaatgatttctcgaatacggcgacgtggttctttattgcgtatttgattggcggaggttcctaatgtggtatcttcct

SEQ ID NO: 5774 - DNA, 294 bp, Aspergillus oryzae
  modified_base (69)..(69): n is a, c, g, or t
cgaattcggcacgaggcggccgtgctttccccgacgtcgcagcccagggcatgaacttcgccgtctacnacaagggcaccttgggcgagttcgacggcacctccgcctccgccccggccttcagcgccgtcatcgctctcctgaacgatgcccgtctccgcgccggcaagcccactctcggcttcctgaacccctggttgtacaagaccggccgccagggtctgcaagatatcaccctcggtgctagcattggctgcaccggtcgcgctcgcttcggcggcgcccctgacggtg

SEQ ID NO: 5775 - DNA, 350 bp, Aspergillus oryzae
  modified_base (339)..(339): n is a, c, g, or t
agcttgatatcgttatccttcaaacacctccaccactacatagaccggaacaaatcattctgcccgtgaaaacaaaccaagatgacagctacaaaagcagcaccatccggacatcaagtcaatgtcctgttcgtctgcctcgggaacatctgccggtctcccatggccgaaggagtctttcggaacatggctgcttcccatcctctaattaacgagatcgattccgccggcactggtgcttaccatacccacgaacccccggattctcgcaccatgtctactctccgccagcacggtatcaagaactacaaccacgcgccagaaagttactaaggaganttctgacattc

SEQ ID NO: 5776 - DNA, 289 bp, Aspergillus oryzae
  modified_base (6)..(6): n is a, c, g, or t
  modified_base (19)..(19): n is a, c, g, or t
  modified_base (50)..(50): n is a, c, g, or t
  modified_base (59)..(59): n is a, c, g, or t
  modified_base (110)..(110): n is a, c, g, or t
  modified_base (115)..(115): n is a, c, g, or t
  modified_base (144)..(144): n is a, c, g, or t
  modified_base (151)..(151): n is a, c, g, or t
  modified_base (184)..(184): n is a, c, g, or t
  modified_base (204)..(204): n is a, c, g, or t
  modified_base (206)..(206): n is a, c, g, or t
  modified_base (215)..(215): n is a, c, g, or t
  modified_base (263)..(263): n is a, c, g, or t
ctactnatcctgaattttntaactgaatactggcgatagaagcactggantcacgaatncgtggatactcacctcccgtctctatgatatgcgacattggggtgactganttctnacacaatcaagtacccgaatattcgctgnataactncattaagcgaacacttttccacgtgcctttganatccggaacatgtgttatantnaacatgtcnttgacgacgtgcaactttaattatgcgccactcataacccttagcatngtctacaaattgagcacggagacttg

SEQ ID NO: 5777 - DNA, 275 bp, Aspergillus oryzae
atatcgaattcggcacgaggattgattgttgcctttctcacaccaccacgtccgccacatcgcgctgttggactcttacccggagatgatccttctatagtccgactcccattacgttccttaccatttcccttcttacgctccttataatacttttaagaaaacgaagccatcgccgccgccgaccagacccagcaccgagcagcccacattacccgccccctccctatcggctaagcctacggcatgcccaccgatcatggaatctcttgtct

SEQ ID NO: 5778 - DNA, 332 bp, Aspergillus oryzae
tccgcacaaccagtgtaaaccgttcatataaatgatctgatacattttctgagagctgtttgcatactatttaccttttcttgatattttcaattagcccaaagagagctgtctgcaggtgaacatgattctttcccagcccttccttgtcgcagcatcggcagctctcctatccccgggactggctgctgggttttcgactgagcttcagagtgtattgaagaacacgcatggtggcaatgaatatgattatcccaccgactttaccaggggtatattgccccataccagtccactccccacaatgattactggagagatattccctttta

SEQ ID NO: 5779 - DNA, 433 bp, Aspergillus oryzae
agaaaaactcccgtggtcttccgagtcgctggaaatatttctggcagtcggtgttcggcctcggggcggcgatcttcctgttcatgaccgcgcagaccccggtggaaaccaccctgatcgtgccgatgctcaaggatgtcagtgtcccgttgggtgtcggtttcgtggtcctgacctacttcgtcatcgtcggttcgagcaacgcggtcaacctgaccgacggcctcgatggcctggcgatcatgccgacggtgatggtcggtggcgcgctggggatcttctgctacctgtcgggtaacgtgaagttcgccgaatacctgctgattccctatgtcccgggcgccgggcgaactgaatgtgttctgcggcccgctgattggtgcccgcctgggttttcctctggttcaacacctaacccggcccagtttttcat

SEQ ID NO: 5780 - DNA, 387 bp, Aspergillus oryzae
taaggaggaggagcttaccctcaagcgatggagggagattgacgccttccagaggcaagtcgagctctctcgtggccgcaaaccgtacactttctacgatggtcctccgttcgcaacaggtcttcctcactatggccatctgctggcatccactattaaagatattattcccagatattggtctatgaagggccactatgtcgagagacgattcggctgggatactcacggtgtacctatcgaatatgaaatcgacaaaaagttaggcatgtcgggcttagaggctgtcgagaagcttggaattgaaaagtacaacgaggagtgccgagccattgttatgagatacgcatctgaatggagagagactattgagagacttggcagtgg

SEQ ID NO: 5781 - DNA, 430 bp, Aspergillus oryzae
tccgctcattcgcaatgtctgaaccgactgtgcttcgcaaggaccagttagagatcagtttacacaatgaaaagaaactgatcaaggagggaaccatcaaggacgataaccctctcgatcttagtgagccatttcgggagctctgcgctgcttgtcgtaagggggatctcaaagtttgtcaagagaagataacagaaggagtcaatattaatgctcgcgacccctatgattacacccccttgatcttggcaagtctttgtggccattacgaggttgcccaattgcttctcgagtctggtgcattatgcgagcgagatacgttccagggggagagatgtttatataatgctctgaacgatcgcattcggaatttgttgcttgaatatgactattctaaatcgactgattcccttcagcctcttgctgccca

SEQ ID NO: 5782 - DNA, 287 bp, Aspergillus oryzae
  modified_base (128)..(128): n is a, c, g, or t
cgataagcttgatatcgaattcggcacgagggtagataccatggggaagaacaagaatgcgacaaaggcactgacacaagaagaaatctgggatgactctgcgctcgtacagagttgggacgaagcantagaagaatacaagctctaccatagcatccacgccaaaggggagaatgtcgaggatgtattgagggatgctcaaggcgctgaaaatgaacagataatccaggaggatggtcaagaagttgaccacatggaggccgatgttgacgagccggcaatcgatt

SEQ ID NO: 5783 - DNA, 271 bp, Aspergillus oryzae
attcagcacgagggctgattcgagggaaagcctgggccgatattcgaagagaagatggtcccgttgtgccggataccttagcagctaacctgaactctgcggctcccgaggtaccgtttgatcctgcgttggttccctacgagtcagcctctgtttccccgctggactttggtaatctattcgactcggcagactacggatttccggaactatggaatatagactttataacaggattttgaatgttctcctgaacgcagatgaatggttt

SEQ ID NO: 5784 - DNA, 278 bp, Aspergillus oryzae
cacgaggcttcaaccagtttggccctaactcggtcaccttcctggttgcagccgaggtctttcccactcctattcgtgccaccgcccacggtctttctgccgccgccggtaaggctggtgcccttttggcgttagttttgtacaactacatcgacacgcagaccaagttctacgtggttccctggtttggtcttgcaggcatggtcctgacctacgtcttcctccccgacaccactggtctggatctcaaggaacaggagcgtcgctggcagttacat

SEQ ID NO: 5785 - DNA, 300 bp, Aspergillus oryzae
gataagcttgatatcgaattcggcacgaggcccagctgtcgggccacgccagcttcggccacatgacgctcagtgataaaatggcgaaaagccctgaggccgtttccaactttctgacggcgttggtgggcagcaaccgcgagtatgtccaggaagaactgtccaaattacaggcgatgaaaggagggtctccattgcagccgtgggaccatgcctactatgttcatcaacgcgttctgcaatattcgcagtcccggcgatcgcgtgagttgagtgctgtacccgagttcttctctctgg

SEQ ID NO: 5786 - DNA, 429 bp, Aspergillus oryzae
gtatcgataagcttgatatcgaattcggcacgaggcagaaaccgatctgaactacatcgcagacggggcttatgtcctcggctgcgggggcgggggaagtccagacgcaggccgtatccaactacaggaaatgctccggcaagggtacaaaatccgctgcattgatcattctgtcctgccggatgatgcactagtctactggggaggacggatgggatcaccggcaacgacagtagagcgactccaagctcacgaaacggtggatgccatcggtcagctcatgcattatatgggtcacaaatccttcgatgccgttgatgggccctcgaaatcggcgggttcaaatggttctttgaagccttttcagtggggcctcagattcgattctacgaacgcccccgttttcgaacccgaacttttatggggccg

SEQ ID NO: 5787 - DNA, 445 bp, Aspergillus oryzae
gacggtatcgataagcttgatatcgaattcggcacgaggtgtcgctattctttgatgagaacttgaaaaagggcatcaaaggcaaaacggagactgaagtggatgctcttctggacaacggcattacccttctacgctatgtgaaggacaaggatctctttgaggcgtactacaagaagcacctatcccggcgtcttctgatgaagcgctcagttagcatggatgccgagcggcagatgatatccaagatgaagatggaggtcggaaaccagttcacgcaacgcttagaatccatgttcaaggacatgacggtttccgaagacttgactgctagctacaaggaacatattcggggggcaggtgatcccgaccagaagcccgttgatttagaaatcaatgtccttacgagtactatgtggcccatggaggccatgtctagtattta

SEQ ID NO: 5788 - DNA, 508 bp, Aspergillus oryzae
tatcgataagcttgatatcgaattcggcacgaggcgaacctaccgataacccagatatgtccgtcttcggtactccagcagcgctctcagatcgcggagccacctgggtactgaaatatatccgcgccgtaatcgacagggtcgcatccgtcaaccccaacatcccagtcatgttccagggaagcttcaaaccggagcagtactggtccaatcaactccccgccgacgcgaaccttgtctttgacgtccacacttactacttcgaacgcaatgtcacctccgaaaccctaccagcccgcctatacgcggacgcacagtccaaggcgggagatggcaagttccctgtgttcacgggagaatgggctattcagactttataccagaactcctttgcccttccgcgaggaggaatgtgaatgcgggtctcgaatgccatgtacaagtattcccaaggtagctgttactggactgcgaagttctcgggcaatgcaccgtgaatggcagggac

SEQ ID NO: 5789 - DNA, 464 bp, Aspergillus oryzae
gacggtatcgataagcttgatatcgaattcggcacgaggcaatttctttctttttattgtacttgtgcagacctccttttcctttttcttttttcacagtacaaatagacagaaggcgttttattcccttctccttcgcagtctctactcgtaaactcatactttctttccttgaccgagcgactacatctccgaaaatgcgtaccgctggtcttctttctcttttactcgcagcgattcccgctgttaccgcggagcggggtacccttggtctcgccctgggtaacaagaatcctgacggcacctgcaagtctactagcgactatgaggccgactttgacgcgctcaagagcctgactaccctcgttcgtacatactccgccaatgattgcaacaccgctgtgaacatcgtttcctgcagccaagaacaagcagttcaaggtcgtgctgggtgtctgggctga

SEQ ID NO: 5790 - DNA, 485 bp, Aspergillus oryzae
cgacggtatcgataagcttgatatcgaattcggcacgaggccaatattggttctcagcaccccgtccccgaaaacatccctcatttgacggctacctctcctggggcgaataacccagcagctgccagcaatggtggcagtaccaactctcaaggacagcagattcctggcagcatcagtgggcacccgggctctattggttttcaaagccgcagtcccgtgaaagaaggcagctatctacaacgcggaactagcgcagatgagtctgagggtaacaccgctgcacttaaagatgcaaaggaacccagcgtgagtccgccccctgctcgcagcggcgttccaatccggcgataatcggcctttggctcatcctctcttcttattcttcccctatttaactgttcctgttttgttacatcatcatcaaacatccatgtttgtttctggtttttgttgctctgtccggtgatggtcacatataaaaa

SEQ ID NO: 5791 - DNA, 491 bp, Aspergillus oryzae
tatcgataagcttgatatcgaattcggcacgagggttttccctaaggacagcgcagcccgcgcaatctttccttcgtcgcgctgcggtgacagctcccaccgtccgctcctccttggcagcaagatccttcgctagcgttcagtcggacatcttcaagccgaccaagtatggcggcaaatacacggtcacgcttattccaggtgatggaatcggtgctgaagttgctgaatcggtcaagaccatttttaaagccgataatgtgcccattgagtgggagcaggtagatgttagtggtgttgatgcgggcaacaaacactcggaagaactttttaaggaatctatcgcttcccttcgccgcaacaagctgggtctcaagggtatcctcttcactcctgttgagcgctcgggccaccaatcattcaatgttgctcttcgaacaggagcttgatatttttgcctcaattgttctgaatcaagaacatcccggctt

SEQ ID NO: 5792 - DNA, 473 bp, Aspergillus oryzae
taaagagaatcgcccccgcgccggctaagaggacatttcctgctcaaactcgtgcgcagcggactcccagggccaagcgtacaccaagattcacaccaaagcagaaagttttggacacatttgacttaaccccacaatccagtaacaagcaaccccgagctataggcacaaatcgggatgacacagattataagtcgattatggattactcccctcctttagagactctcggaagcaatgcgaaagccttgaaggcagactggaaaggacaaatgctggatctcagcaatgattcagatcgacacttgttgaacgccgctgagctcaaccttgcagccacatttaaggctttcctgtgcaacatatctatgcagcaagcgttcgcatttttgaggctcgttgtttaaggctttgaatgttggggaaagaatttccggaaagacagatgcttcaaacagcttggcaagatttga

SEQ ID NO: 5793 - DNA, 457 bp, Aspergillus oryzae
  modified_base (434)..(434): n is a, c, g, or t
cgcgcgtccatcattgctttcctctcttaacgaccattgatcgttttcaattaatcacaatggccgaatacctagcttctccttcctttctcacggataattccgtcgctgctgtcataaaggatgcatacacttctttctcagagcgaagggcggctctcggtctgcccaatcccggaaccgtggataacatcgctagggaggtgcaaaaggaggtcttgctatccaatttcatgttctcgggactccgagcagacctaacgaaggtcttcggcatgtctcctctgtttcgtgtgtcgcatgcgttctccatgggctcgtcggggaacctgcctccctatgccttctcggctatgtatggaaattccaaaggttttcatgcaaggtaacttcggaagcgacggcgcactcgccgctgtcggcaactatcgttngagtccaaaattgtcaccaagac

SEQ ID NO: 5794 - DNA, 451 bp, Aspergillus oryzae
  modified_base (147)..(147): n is a, c, g, or t
gcggacgcgtgggtttttttttttttttttttcaacttgaactgacgccttcccattcgagctagagtacggggaaacctaatcaacattgtaataaggggaaaacccggaccaaggcgaaacggatgaaaccaaaccaccatagcnttaagatattcaatgtcttacccgacaactcaaccaaccacgtggagaatctcatttcatggtccaacgtcatcaacatagtcgcttctaccatcacccccatcatagcattgatatttaggcattctctcaaaaccaagttcgtctgacgtccccttccgacagtagaggagaacgttgttgatgtgccaatcgtctagcggatatccctcgctacgtaaaacgtccctttatctgatccctggtagttttccgacagtcaggaagggtcttttccacaataagtaaaatatggggcggtgca

SEQ ID NO: 5795 - DNA, 446 bp, Aspergillus oryzae
  modified_base (148)..(148): n is a, c, g, or t
  modified_base (151)..(151): n is a, c, g, or t
cccttctcggtccaacaacttactcaagaagaccatgtaaaaatggcagtcacttgtctagagaggattgctcgttttcacattgtatcactccatttgctttctagccctgccaacgaagaaccgttcgatcatcaccaggaacgtnaanagcttaacaatacgatgttgtcgctgatgtactactatgatgacaatcggggtcgcatctcgtttccaaacgaagatgaattccgcgcgtattatatcatcttttctattctcgatcagcggcctgacttggaagcgcgtgtccagaagtggccagctgaaactacgcaactctcccgcgggtgcaattagccactggaaactactggctgctgctggtaatgggtgggagttatcaggggacactggactctaaaaaggcaaaaccgcaattgcccaggtttttttaacaagcc

SEQ ID NO: 5796 - DNA, 323 bp, Aspergillus oryzae
  modified_base (266)..(266): n is a, c, g, or t
  modified_base (295)..(295): n is a, c, g, or t
gtctagtgtaaacggggtggttgagtttcttagggttagtaccacctggggcgataagagttgacacgcaaaataagtattcttattggtttccgatgggcattctgattttgttgaactttctcttaccactgcgacatgtcacgtaaagaatgcggccaaacgtggctggcaacctaacctgggtcctgtgtacagtcttataaggattgttcaaaggtttcggtctcatctgctcaactgcccaaactcaacactcgtgcttncataacgttttaatgtcattccacaacanaagtagcatccatcgtcaaagcaatcgt

SEQ ID NO: 5797 - DNA, 276 bp, Aspergillus oryzae
aactacctgggtcgtcagcagtgccactacctttgggagctggtgaacagtagtgttgagctttaccctggtagctgtagctaccacctgcttaaccacgatcctgccaactggaataacttggttagtctttggagcgcctcgccgcctgctagtagttctgtgcgtggttgcaaccatagtattaatcttgattcttacaattttcattggcacaattgttgtggtcataacggtggtaatcaacttagtcttaacctttacaatcctgccaca

SEQ ID NO: 5798 - DNA, 286 bp, Aspergillus oryzae
agatcggtgtgatgggtctgtgtgcgcgtacgcattaggtggggtatgatttacgtcggtggggatgggctcaagacagggtctagtttatgtgtcggatggcatgactctacgtgtgtgcaacacaaccaaatataaaaagttttaagagtaaaattaagagttagtcagagtaaacataggcatgcgtagtcgataagagtaataacagctagggtaataataacagtgttcgtctgtgcggccttctgtgcctgctgccggtgcaccttacttagctttctaa

SEQ ID NO: 5799 - DNA, 358 bp, Aspergillus oryzae
ctacttctgtccggctttaggctggcggttatagcgctacttttaagcttgctatctttgtctgcactgttgttaatccttaggagactgagtctatttttgaggagactgttaggctatcgtttcgggtattgagtgttgtcataatgcttttcatgccgtcaataagttctgtcggaataccaacgctcctggcgagttcgaggaggtctttgtcgattataaggctacttcccaagcgctctgacgcgtcggctatgcccaacgaccgacgccccgcycgcacgcttacacggaggacagaccggcgcacacatactgcacacacgaacatwggtcaaacgcacatactaaaaat

SEQ ID NO: 5800 - DNA, 500 bp, Aspergillus oryzae
gaccatgtaagtctcaacatgatctatcacagggaaagtcggcatgttcgtaggcattggcttggaacctttgggctgatttatgtgcttggcttgcttagaatactaagttttaggccgattgtcattcgacggttaatgggttatactacttcttccgtcgagggctgctccgctaattccggtcgcgtatcggctatcttctccctgctacgcttcgtcttcctcttaattaggcttctgtttagactgtttctcataaggttgaggacgtcgagcccggtaagaagcatgctgagcctggtattatmggtaagaagtttgctggcgctcatgcttcttttaaggcttctgatgaataggccgtctcgcgttattccgagtatgctaatgttgagtctcttaagtctattttcgcttaggttgagcattccggctctttcgttgagggctttcataaggttgattatcattgtcatcaaatcttcttcccttgcccg

SEQ ID NO: 5801 - DNA, 462 bp, Aspergillus oryzae
gctttcataaggttgattatcattgtcatcaaatcttcttcccttgcccgccgccgaccggcacatttcaattcagacctcccctaataccactatgacgccatgaacaatacagagctttacccaatccgggtctaaaagcaccccgctcctaatggtaacaaaagcggtacacacgggggccaccatggacagcgcccacgggctggtccgttcaccccgtacctaatagcgtgcatcgacgggctacgctccaacgccaccgcccggtgaccagacgagagtagattgaggttacgtcacagagtacccaaacaacaaadaadaccgttctaraaaaaaaagaaaaaagaaaaaaaagggtggtgtctcagagggcttaggtccatgcatktgcgtacgtgatgctacagtctcctcacaccgctattcaaacctaacytatcggtgctgccccatagt

SEQ ID NO: 5802 - DNA, 543 bp, Aspergillus oryzae
  modified_base (483)..(483): n is a, c, g, or t
atatgtcatgtcttactgtgagggattcctgcatgcagaraatcgaaacctaaccggatgctcacacccgtcactactgttctccttcaatgcgacagaagcgttaacgaaagatgctggcaacaacacctcgttatccagcctgggatggccgagttccatcaccgatgatctacgcacgttcggtgctaccagccagagtatgggtgtcttctactgtattgggataggatagcgggactggcggttttggaacgattgtggttcgtgatcgcgaaagggccgagacagacggttgtagaagtttcttctcttatgcycagtttcactatgctcagcataccgtctatcatcgcaacggtcgttsccttacaatttgtgagcccyatcaatcgtcacggagaggagtctggtgtgacagcgagatatggacatcaattyttaggaatgacgtgggmagccgtccggttgttgctggtcggnagcactgtcagtttatcgagggtattggtggaccgcaaccgatcggcagaccagtatgaa

SEQ ID NO: 5803 - DNA, 321 bp, Aspergillus oryzae
ggcgttcaaagtcatcgtcatcataatcatcgacattcgtactgtctgccagaaaatcattctttttggaggattccttcgcmattcgagtcgccagctcgaagaaactgcgcactgtgagatccttcatcttgtaaatcggatcatttctagtatcgtattcgacctcaaagacgaaagcattatcattatgggtcstttcacgaacctcgttaacttcggtgtctgtaggrttgatggagtcacccgcaacttcccagctgttggtcatgtgctcsttaatcctgcttaggttggcgaaatattgartgtaaccaacca

SEQ ID NO: 5804 - DNA, 403 bp, Aspergillus oryzae
  modified_base (234)..(234): n is a, c, g, or t
  modified_base (239)..(239): n is a, c, g, or t
  modified_base (276)..(276): n is a, c, g, or t
  modified_base (296)..(296): n is a, c, g, or t
  modified_base (345)..(345): n is a, c, g, or t
tagtcaattgaacttggtgttgccagttcaagatgggtttactaaggaagatgccatgattggtatcatcggcatgggtgacatgggmagatgtatgctcagcgcttgagatggcagggtggaggataaatgcatgtgaaaacctgatagtwttgagagcytgaaactagatatagttccyaacaaggtgccactattaccgaatggcacccggtttcaagataagcgaytaantatanacagtgagaggcaggagaatcgacaaggagrgcgganatggccaccatcaggccggngcgaagtcggaggcagcccacatkcaggccccgcgcaggcgcgaasagnagctacacctacggtakaagaaaatatacagyctaackcacatagsctaatgaacccg

SEQ ID NO: 5805 - DNA, 343 bp, Aspergillus oryzae
gaactccgatyycctatctcctcatggcctcagccgggggcttgactcgccgaagaggtggcggtcgagtcgctggcgcagagagaacgacgacagccgagtctcctctccgatctctagaaatggctcttccttggataascgtatccccgagacgtctttcaccagtaccgagaatggtcacaagatcgcattcgaccccagagacctcagcgagaccgaggaacgaagcaagcagcccaagctgacgctgatggaggaagtactactgctggggttgaaagataaacagggttatctgtctttctggaatgagaacatttcgtacgccttgagaggatgt

SEQ ID NO: 5806 - DNA, 326 bp, Aspergillus oryzae
agcgggtgttgtcggtgtggatggtcattttgcgcaacaggaggcagtacgtctagttgtagtacagagactctcccctgattcattgaatggcgattttctccaccacggccaggagcctaaagaggttgggcgtgcattggtcaactacggcagcctcgaaatcgagcgcatcaaagggcacaggagtactcaaattcagactttgcttggatacgcagatagtgaatatgtcgctcttcgagaaaatatctccttctttcaacaggacgatccttcatggcggtacaaaccgttggtttaggtaaatgaaatagctgctttgc

SEQ ID NO: 5807 - DNA, 330 bp, Aspergillus oryzae
gagcttctcttgaaccctctcccctctttattcactttcaccatgttcaagctcgcccgcagcaggccaatcgcggcagcttttagagctgcgacggakcttccgttcaatctcgcatttgccagcaacagagaaacctgtcgatccatgtacgaagcagaccggtgctgccggccgtctttgtaatgctgtgtatatctgcgagcgcaagttcgctcgcggtgagttctacctagccgttctcatggatcgccagtcacagagccccgtcattgtcgcctcctcacaaggcggtatggacattgaggccgttgccaaggaaacccccga

SEQ ID NO: 5808 - DNA, 342 bp, Aspergillus oryzae
ggtcgatatatgggccgccaatcgtgtttccgaattcatacggcatattatttggagtcttttgtacctgcgcgatgcaagcctttagatcgtcggcaagttggctccactcggcatacgacatcagatgccagacaaccgcaagagctgtccgtgtaaacgtgtcataattagatacatcttgcctaggttctcgacaacatccgctacacggggtgctgggatgctggtgtactgctcaaccaatcttaatgcatggcttcgtttcgtgaagggggatcccactccttgacgaccaaaccaaaagggatctgttgaacccattgtcccgacaatatcccg

SEQ ID NO: 5809 - DNA, 540 bp, Aspergillus oryzae
cattaataagatctatggcctcagctttgacatgtgggtgagcgcaccgaatcagccaggcgggatcgagagtgcattccatctctacacccgcctccaaggggaccaacgtcatcctgcacccccaaaacgcttggaaaatattcccaattggcggacatcgtttccccatctcaactcagtcatggcagatgttaacaacccactgaactgtgatatcatcctactggaggccaatcttcggttgatggatgatttccctccgtccggctcgaaacttgggatccagctagagttagacttcacccagcctcccaacggcgatgcactgacgaaccaaatggagacctggtcgtgcagcacgtatatctatgaggaaggtcaaaacatatatagggcacgccaagacctccctaaacagcaatcgaccaaagtgaaacctccatttgaatctacgtggtgggcaaacgtttcacggactcacggaaatcgccaaagacagacaattaaacgagcttgccgatagaaacggagagatta

SEQ ID NO: 5810 - DNA, 380 bp, Aspergillus oryzae
  modified_base (273)..(273): n is a, c, g, or t
  modified_base (318)..(318): n is a, c, g, or t
ctaacgctttccttgtgtatgcctctcttttgaaagcatcaacttttttcgctaaccttcccctccttctccccaatcctttcccctgtcttttgatgctcttcatcttcgcgttgggattgctttcttcgaaatagttctatatacgattgtttctattctacacgggttgaccctgtggtattyctgattctcggcyggtacggttgctatcagctcgatcacttggagtttgcaccatctttaatcattcaatcgccctcagaaattcgnctcgatcgcctatcgaaccgaagaactttcgaattgggattccgngcttgtgagcmaccgacacctgaacaacacgtttgaggttggcacttgaacttaagtattag

SEQ ID NO: 5811 - DNA, 430 bp, Aspergillus oryzae
tattcactacctaatcaacacccacattaccgttttcacgtcccctttattgacgatcaggcaaagctccaacagctcggatgcgatgactcttctacaagctgttcggcctcacctttgcctaagtcttagccgaaatggctcgagctcagtgcccagagttttcgaggtgtgctgtgagattttctggcttatgcttaagcatatgagagtgatgatgaagaaagaacttgaggtgttcttgaaagagatctatctagctatacttgagaagcgaaacgcacccgcttttcaaaagcagtattttatgaaattctggaagattggcggacgaccgcgtgcactagttgagatatatctcaattatgactgtgacaggacgcactggagaacatcttccaaaatcatatcaattttcagttcaccttgt

SEQ ID NO: 5812 - DNA, 399 bp, Aspergillus oryzae
ccatccacacgcgaccgcccggccacccgcgaccagggtgaaaactcgctagtcgttcctagtcgcacctcctcgcttcattcccgcatcacccagccgatcccgtcacagatgaacgcgaaaccggcccagcgaacgccaaaaaccttgacccatgcttacatggtctgtggcgtgggcggggaccctcccaatgggtgagggcgcccgcacccgagcagggaaaaattggccatatgaaaggtgccgtgggtcagttttggttgcscgagatcctgggtaggagcccccggttggaacaggataatgagattgctaggtctttgcactcggcaaagagggcatttttcccccacgacgttgagatctgcacaagccaaaaaccaaccttattgcgta

SEQ ID NO: 5813 - DNA, 453 bp, Aspergillus oryzae
  modified_base (129)..(129): n is a, c, g, or t
gcaatgttcggcccacatcatctgcgtctcagacgtctagtggtgctggtatggtcgattctgtgaaccttgaagaagacggtgcgggctttcggaaccctccccctgtacaaccaccaagcgacgcgnacagctcgaaaagacaatcagagcctagtattagtattgagaaggcagcgaaaccgacttttgagatcaccgtcggggcccacacaaggtgggagatctaacgagtagtcatattgtttatcaggtccgaactaagacaacttctaaagcctatcgccagcctgagtttgcygtcagccgccgatacygtgactttctttggctttacaattcaatgcataacaacaaccctggcgttgtcgtccctcctccgcagagaagcaggcagttggccgtttcgatactawtttcgttggaatccagaggggccgcactggagcgcat

SEQ ID NO: 5814 - DNA, 374 bp, Aspergillus oryzae
ccactaagataaagattttgggacaggagagtataatcgctgatttcggtctttggcgcaactatgtcgctaaggacctgattagcggctgtcctccacaacctacgttctcatcaccgatacgaacattggatcgatatataccccggcttccaaaaaaccttcgaagatgccgccaccgccgtttccccgcgccacgttgttagtatatcattgcccccggggaggtctctaaatcccggcagaccaaagcagatattgaagattggatgttgagccaaagcccccgtgtggccgtgacmtgtggttatcgcgctgggcggaggtgtcattggagattgactgggttgttgctcgacctatatgcgtggtgt

SEQ ID NO: 5815 - DNA, 450 bp, Aspergillus oryzae
tccgcgagagccaccgacagcgtttaacccgtcgcacctgtatgtgaatacgcatccgtcgtataagattcctaggatatattgtccgccggagacgaatgtgtctgttcaggttatcatgtttcatcgcccccatcctacccgaatggagtatatgtcgctagagccgatttcccttgctcttggcgacaaggtgtctactgcggacaaatccgattcggtatccgacaagattgatacagaggagggacgagataaggctcagtctcagaagttggttgaaaaatttaagcttcatactgttgttaagcatgtcccgtcgcacaaagagcaggcmctacccctcataatcaaccaagtaaactgcgcctacgagatgggaaagctcatggaaaagatagtcacctgawtsgggattcgggtcaraggagtatgagcgttggtgagcga

SEQ ID NO: 5816 - DNA, 450 bp, Aspergillus oryzae
ccggatatgtgccgactggtgctcataccgatgctaacaacacccacgcgagccggtggacacacttgggccactgtgttgacattctgctgcaaaacatccagtgcaatgctaacaccgaggtaatcaccttggcctgggtggaaggtcgcacacagccgtggcctgactttagtgttaatcgcaaatgtagagatttcgaagscatatacaagtggcaactagagaattctgtggatgctggaragtttgaccgtatgccaatcccccacgatgcctatgtgtggcctgcaccttgggagaamcgggagtcggaacttggggagaaattgggtaaacatcaaaagcaagagggggttctggggcaggctggacaccaacatacgaaaaggcmcgaatagctcccatattgcagaagcgtaatacgtccgacttggttgagtgatattg

SEQ ID NO: 5817 - DNA, 540 bp, Aspergillus oryzae
agtcctttgaggtcgagcgggaaatgactcaggtactaatgcaggacatgatagccttcgttgtcgagataaagaatggccctctacgaaacgcctcactgtttgcgcggaaatgcatgaaatcgatggaagatattgagaagtggcttgtacttgttgctgaacaaatccagaaagcatccattgttggtcaagccgaagacgccgatataatggaggccatagagtatcagcgcgccacttgcagcaacagcatgagtcattgggcgctatactttgctacctgttcaaaggcccttatactagccccgaggatcttcgactgctgcttgtwaaccttcggaaattggaccggtttgatgggctacttgtgcactatatcccttctattatcgctgctttcgttcaacatggtccccggaaagatcaaattcatataaagaggccggascttgcacacggctgtkacttcggccaaagatggccagtcctgggccctcccaactttccattctgcaataattgctctctggcttgcgg

SEQ ID NO: 5818 - DNA, 500 bp, Aspergillus oryzae
tggccatcaaaatcaccgtcgctaacatatacagtcaacgagtcgtactcatcctcaagcttttcagcaattgcagacttggtgtacttagacaaggcatctgtcggcattccccagtgtaccaacccagaccttgtcttctaattgtcctgcatctgtcgcggaccgaacagcgttgcgacccccccattgccctgctctgscgtttcgattgtccattcagcgctggaaaaggatcccttacggctgggtccctgctgtggtggaccccactagggcgttgagtgtagagtgtttctgttccttatcagatttcttgggggraggctccgtcatgggcgcaaaagagctcctggtgctaagggatggatggggacggcggaaatagttgcccgcggccgctctagaggattcaacctacgtacgcgtgcatgccacgtccatagctcyttctatagtgtcacctcaaatccatatcactgggccgtcgtttttacaac

SEQ ID NO: 5819 - DNA, 450 bp, Aspergillus oryzae
ccagagtccttcgacctcgatgccgctctcaagcaatgggcctccagccaagagtccaatgccaatggcgaaactcctgccatccaagcaatggaaacccgtcaggcctggtaacatcgcccttggctacctgttttctcaagacttcgacttgaagaagcgccatgttccccaaggcattgtcgcctcttctgccacccttccttatatgcgcacaccttggagcagctttctctgctgtactcagttgccagccctgttgccgcgcatgttgctgctgtcgactatgccggagaggagggcttggtttccgactatrcgtccgccctttctcttgctgaagagcttggactgggtctcgtttctagtgcctccgttcacgagtcgcagcacatggcgctgctcacgactttactcgcgtcggtcttgccctctgttcatatttacgat

SEQ ID NO: 5820 - DNA, 426 bp, Aspergillus oryzae
tcgcccctgagtccgaccacggcgccaacgctggtctcaaggctgccagagacttcctggagcctgtcaaggccaagttcccttggatcacctactccgatctctggactctggctggttcctgcgccatccaggagctgggtggccctgccatcccctggagacccggccgccaggacaaggacgtcgctgcctgcacccctgacggccgtctgcccgacgcctccaaggaccaccagcacgtccgtgacatcttctaccgcatgggattcaacgaccaggagattgtggctctggtcggcgcccacgccctcggtcgtgcccatcctgaccgctccggtttcgatggtccctggaacttcagccctactgtcttcaccaacgagttcttccgtctgcttgatcgatgagaagtggcagcccaga

SEQ ID NO: 5821 - DNA, 451 bp, Aspergillus oryzae
cccacgcgtccgcccacgcgtccggtccaaatggaaggccctccagtttcaccacttcggccgtgcctactctggcaaatcagatgtgctttctgagtcctaacgatcaaggtaattgcactcccgaacagcaggactgcaccagtgcccagaatgcagtcttgatatcctctactgcaagagctatgccatcccaatttgctcttatgggtgggttaaggggtcaacaatcagcattacccccggatcctagagttatgctaaacacaaatgtgccattctcggccttcatatgtggggtccaaggcagtgggaagtctcataccactagctgcatcatcgagaattgctccttgcccttgcctactttaggagccctgaaacagccactctccactgttggtgcttcaatttcaatgatgtacagctcgaatgtttggcgcccagccgt

SEQ ID NO: 5822 - DNA, 492 bp, Aspergillus oryzae
  modified_base (92)..(92): n is a, c, g, or t
  modified_base (282)..(282): n is a, c, g, or t
  modified_base (285)..(285): n is a, c, g, or t
ccccctccttgttctctatcgccgttggagtcaccggtggtcaagatacttatccgacgattcgtggcgcgatcggcgccttggagatttcntcctcctatctatcgatcattttccaggatggcccagccttctgcccctcagaatcccactggtgagcccgcggctcccgtgtttgacactcccccccaggccgatgaccagacgagaaaccaaaatgccgatgcggcagctcctaaggtgaagaccgagaaagaattggagcgtgagcgacgcaaggcnganaaggcgaagaagttcgctgagaaaaaggccaaggcagcagctaaacccgcccctgcccccaaggcccagaagaaagagaagatcgagaaggagaaaactaccgatgcgtacgatcccaaggtcatcgaagccggccgttatgaatggtgggaggagcgttgatcttttcaagcccgaatttgggctccaaccggcaaggtcaggccc

SEQ ID NO: 5823 - DNA, 278 bp, Aspergillus oryzae
  modified_base (165)..(165): n is a, c, g, or t
  modified_base (205)..(205): n is a, c, g, or t
acggatcgttcaaagatcgatcgttcgactatcatctgaacaccagagtaaccgatatatttcctgaccgcaagacggtaaaaacctcaacgggtgacataatcgcctacgatcttcttgttctcgctaccggctctgatgcggtgcttcccactcacactccangctatgacgccaacggggtttttgtctacagaacgatatnggacctcgagcgccttatcgaatttgcctctaatcacaagggcgagacggcaactactgtcggaggtggcctg

SEQ ID NO: 5824 - DNA, 480 bp, Aspergillus oryzae
  modified_base (192)..(192): n is a, c, g, or t
ggtcactagcctcgtccagtcccccaaccagaccattgaaggccaaacagttcgcgatgtctgggatggctacatcgcgaccatgggtagcggcagtgacttcaccgctttccaggactttgcgggtgtggccagccttgacctgggcttcggccgtggccccaaggaccccgtgtaccactaccactccanctatgacagcttcgactggatggatcgatttggtgaccctggttggctctatcatgaagcctgcaccaagctctggtctctagctgctgccaagctggtcgaggcccctgtgctgtcatttagtgcgtctgactatagtactggtctcggtcaatatttggagaagatcaagcccggtgcaaagaaattgcgtggcggcgaattctactttgggtctctggacagagcattcgccgagttccaggctacggctaataaattttgacgcctatgccgcttgacttgact

SEQ ID NO: 5825 - DNA, 342 bp, Aspergillus oryzae
atcatggctgaggaagaagaccctatccgttcaggccttgcccccagcaaccgattacctcacttaccttaccttgttggagtaccaattgacccccgctcgcttgcccactctccacaagctcttgcaagatgaggtcttgacaaccaatattggctgggatctagtccagctgctgctgcccatgctccctcagtcactcgaatgtctccaggatatcgcccgcttgggtaatcctagggaggtcatcctgcgggtgtccgaagccctgatgcaactgcaacctgaggatgaggacgacgacgacgacgacgacgacgaagagaatgagacagcagagcc

SEQ ID NO: 5826 - DNA, 259 bp, Aspergillus oryzae
gacaacaccaccccagccgtcgataccaccttccacggaatatcttcacgatgccccagctacaactgagccgttggctaagccagttgagaatccaagttcaacatatcttcctcagaccgattcaccgcagcaagctgcccaacaatctcccgcctatatttcccaacaaccataccctcaaccatcacaacagaaccgctctttgggctcctctcgtcctttgtcgggcctctacgcgtatgcgaatgggtctacg

SEQ ID NO: 5827 - DNA, 273 bp, Aspergillus oryzae
ctcacaactcatattgcacctattttgcgcgttccacctatcgttagaattcgaattgagcatgtctcgtaggtcatcagtcatgccgtcgaatgcttctacgaagagcggtctcccgcccgccggcgacggaggccaggaaaagcagaagatgcttctgtctgcggaaacagggcacttcagcatggtcagggctttgcatcttgcagatctagtaactgagcttaacggattttgtggagtcatgtctgtgctctcgtctatgcgttactg

SEQ ID NO: 5828 - DNA, 559 bp, Aspergillus oryzae
gtcataccatagaccgtggttcttatgttatcacttcagatactgaaggctcccccaacaagaaaccacgaaataacgcagccaccggggcttctgctgctggggttcgtgctctcagcgcgcagttggttgccttctacttcagagcgccaataaaagcattttttcgcactcgagttgattacatggcatttgccagggctgtcaatccacactcatctgaaagccgatggtctctccatactactaccccggggttacttgtccatgctgttcgcacatacggttggcgctttattccaaatcagataatgcctccccttttagcaaatgccggggttggtgctgtactatatacatcatacctccaagttcttggagccttgtatgagccagtttcccgtggggtcaagccgtatctatccacctgctagtcccttatatacatttacagctggatttgcggctggaactatgcaatcaataagtggctgcttctttagatgctctccaggttccgtcttcgggcgaatgacatacttgaaggccagtatcggag

SEQ ID NO: 5829 - DNA, 552 bp, Aspergillus oryzae
agaagccagacgtctcgggactgttaggatagtatcatatgaatggttggaggattctctactttcccgtaatcggacaccaaaacgggagaaggcatatctcatcgagaatatcctcaaggaggaaaggagagctgcaaaggagaaagccaggaagaccccaaagcagcaggataagtccacaaataggcccggaggcaagtctacaggcaaagcaaacacaaaaggcccttcaggtgccaagcgtgggaagagagctggctccagtacatcgggatgtcatgtgtacacggatacgacagcctgtctaacatacaaagcaacgcttgtccgacaggcaatcacgaagcgtaatgagaaatttcagcttacgatctacgaatccagcgaggaacatgttacttatgaaaccgaatgcagatacagccgtgttggtaaatcaaactcccagattcttgctccagccggaagcagcttagacacggccctagtagcatttgaacggttcttcgaagaatacacgggaaagagctgggcgctgcgtgggaacga

SEQ ID NO: 5830 - DNA, 549 bp, Aspergillus oryzae
ataaggtcaagcgcttcgcttggctggcggttacattagtcggctattatgcatgccggaagttccccggggccgctaaagactatctcctcggcctggtccagaaacaactcccaaaacacatccaagcagatccacatttcacacctgggtataatgtctgggatcaacggctcttggcctgtccagatggtgacttttttgagagccttcatcgcggtaacgtccgcatcgagacagcgaatatccaaacctgtactcccaacagcattgttctcgataacgggaaatccatcgaagtggatcttgtcataacagccacgggccacaagcttcaattcggcggtggatccagtcttgaaattgacggcaaggtttgtgatatctccaaaagatgcctgtggaatggtatgatgctccagggcgttcccaatgcgttctttgctctcggatatctcaccaatgcctcgtggacgatgggggtagatgtcacggccttgtctgcctgtcgactgatcaactacatggcgaagagggacatccttgcgg

SEQ ID NO: 5831 - DNA, 424 bp, Aspergillus oryzae
cggacgcgtgggcggacgcgtgggcggacgcgtgggcggacgcgtgggtaaagccagtattaagaaattttgttcgcaatattcgatctttttcgttcgtagtcacggttaatcttcaagataaaagcttagatcatggcacccaaaaagatcattatcgatactgacccggggatcgatgatatcctcggtcttctactcgctctgtccgcaacaccagaggaagttgaagtcctgcttatttccttgacattcggcaacattgaagtaagaagctgtcttcgcaatgtcgtctcgatgttccatatcctcgaacgagagatgcaatggcgtcgggagcaagggccgtcctgaagggtttggtgccctgcgtgctgccccgccagtcgttgcggtttggtgccgaaggatccctcgaagacca

SEQ ID NO: 5832 - DNA, 442 bp, Aspergillus oryzae
ggcgtgccttcacggcctggctggtcggattcgcacccagtgttcctggtctcgccgcattaaacccccataacacgggaatcccgatcggcttgacgtatacattctacctgtggcccattgcgggattcttcgcgtcgttcgtgcttcatgctggtctgtgctatctcagtcccccggcgggtattgggaaagtggatgagcaggaatttcatgacccgatgtatagtgagcggtcggatgagatgcagagccagaccatcaccgcgatggagaagggtcaacatcggtagactgactctggtctttccatggtgaatgatgtgagttgggacagggggtcgtggtaccttggttataccggccttataacggatgaacttgttgtgtccatgttctaagtaaaattctattctatgtaagtaaataataacactctcgc

SEQ ID NO: 5833 - DNA, 320 bp, Aspergillus oryzae
gtggctttggccgtggtggtttcggtggtcgtggcggcttcggcggtggccgtggcggctttggcggattcggaggtcgtggtggctacggtggtggctacggtggacctcctggtggtgctggtggccctggcttcgagggtgccccttcggttccccccaacccgttcacggattttgcaacctaacggaggcgagaaaggcccggttatctatgtccgcaacctgccctggtctacctgcaacgaagatctggtcgatctgttctcgactattggaaaggttgatcgtgcagacattcactacgagcccaatggtcg

SEQ ID NO: 5834 - DNA, 529 bp, Aspergillus oryzae
cggacgcgtgggcggacgcgtggggaactttgttgaggggcccctggtgtcgacaggaggtcatcttgccgcttcgaaccataacttctgcctcaaaacttcgtcggccttttcctgtaccttcatcctacaagcacaatccgcgagcctttgcgtcagtatcctaccttgcgtcagagcagccgtcgcattccacgtccacagaaggaaaagagatttcttcagacaatgagccgtccaagccgactagtcatgttccatggtatctgcaagaagacacgccggtttccgactcacagatatcgtcccgagatcaaattccagatttaccagaggacccacctgcgattctctccccatttctagactatgtgttcagagaccttggattagatgaacttaagctgattgacttacggggttctgggaaacacctcctgctctttggcgcaaatgtcattatgatcattggaacggccagaagtgtgaagcatcttgaacgtttcggcagaccgtctttgtcgatggg

SEQ ID NO: 5835 - DNA, 417 bp, Aspergillus oryzae
gcttgatcgatcccaacacgtctcgcccacgttcacaacctcaacagcgtacagagatatcgcaagccatggctgtgaaatctggaaagcagaaggaagtcgcgatacccaggctcaggattcgcaaagcccaccggaaatcccggcagggctgtcggaactgcaaactacgccgagtaaagtgtgatgaggtacagccctcatgtcagcgatgtactgcctacggtgtcctatgcaactatggctccaacgctcccgacttacaaatggcccgcgagatggaagatccggcggtgatcagcgctgatactacgaccacgctagagttaccagagaagacaaagactatctaatctcttttgagaaatcggggaccctttgttacaattgccactgtccgtcacaagtgaggtcttg

SEQ ID NO: 5836 - DNA, 411 bp, Aspergillus oryzae
cttctctttctcctctcctctctcttcttccttctgtcgtgcggttagcttgtgctactaccgagtcgggcttcttagtttgagagcccgttatcattcatcatgcgtttcaacgcagctgttgcctccgctctggtttcttcggccactctcatgggctatgctcatgctgaggaggcggagaagaaccccgacgctacctctgtcgtagagaagccaactttcacccctaccaccctcaaagctcctttcctcgagcaattcaccgatgattgggaatctcggtggacgccatcccatgcgaagaaggatgactcccaaacggaagaggactgggcctacgtcggtgaatgggtccgttgaggaacccactgtcttcaagggtatcgacggagacaagggtctcgttgt

SEQ ID NO: 5837 - DNA, 499 bp, Aspergillus oryzae
caaagatagacattatggtgaacgaagtaggaactgtgtattggccgtacgtggcagcgctggctgttattctcatggtagctcatcgcgctcgccgccagcatacgattccagccgtgggtgacgccaatgactctaaccttctggaagccctgaaggagggttcacagcgttatcccgagtcgtgtttccaaattgcgactaaggacatcccaaccgtgattgtgcccctcaaatgtctctctaccatagcatacgctccggaagagaagctgagcttgggccgcgaagtatatgaacgcctcatgggacgctatactaggatggtgaagagtgaccatctggcggagtttgtgcgagctggattgatgaaaaacgctggaaacagtgtcgctctactgcaagaagaagccgaacggacggtctcatcgcaaaattggtcttgtcctgacttggaaagtccggtcgcactgttcccttaccatggtcaagctggtgt

SEQ ID NO: 5838 - DNA, 482 bp, Aspergillus oryzae
cggacgcgtggggtgacaagctgcagagtgtcggcagggagttcggtgtcactaccggtcgtcgccgtcgctgcggttggcttgacttggtcgtctgccgctactcgcaggcgatcaaccactacacagcccttaacctgaccaagctggacgttctggacgacttcgacgagatcaaggtcggcgttgcctacattctgcccgacggcactcgcaccgagaacactatccctgccgacgccgaagttctcgagaaggtgaaggttgaatacgttactctccccggctggaagagcaacaccatgggcgtcaagaagtacgaggatctccccgacaatgcgcgtgcgtacatcgagtacatcgagcgcgaactgggtggcgttcctgtgaaatggatcggtaccggtcccgctcgcgatgacatgattgcccgcgagtagagcaattggaaatttgactacatctagacgggttgatccttg

SEQ ID NO: 5839 - DNA, 221 bp, Aspergillus oryzae
  modified_base (56)..(56): n is a, c, g, or t
cgtgrttacgaaractgtatatacgactcgctataggggaaagctcggtacgcctngcrggtaccggtccggcattcccgggctcggcccacgcgtccggccgctttctgcatataacagacctacatccagactcgcacttacaaaaccggggagatccgtatgacgaggatgacgcttgccattggggraaaaggccctgcggagctagctttgcgggg

SEQ ID NO: 5840 - DNA, 708 bp, Aspergillus oryzae
acccacgcgtccgcaacagctttcacaatggccttcggaaagatttacggtcagcctaacaacggtcgcaccatcgctgccctcgtcgcggctaaggccaacgacgttgagctcgagctggtccagactgaggctaacgccaacgccgagttcaacaagtctgctgagtacaccaggtatcagccctctcggcaaggtccctgctttcgagggtgccaatggttacactctctccgaggctattgccattgctgtctacgtgacctcccagaatgagaagaccaccctcttgggtaagaccaagcaggactacgcttccatcctccgctggttgtcctttgtcaacgctgaggttctcccccatttcggcttttcgccgcttctctccycacccgtgcctkcgckaccgtgttggacaagaagttccgctctgagaaccctgctgtctctcgttggttccagamcattgtcaaccagccttacttcaaggctgttgtttgagaacccagttcttgttgacgagatcatcaagtacacccctcctaagaaggaggagaagcccaaagaaggaggctgctcctgccgcggcygcygagcccaagcctgagggtgagcagaagaagcccaagcaccccccttgaggctcttggcaaggctgatttcatcctttgatgaccttaagcgtaaccactccaacgaggacacccg

SEQ ID NO: 5841 - DNA, 439 bp, Aspergillus oryzae
  modified_base (310)..(310): n is a, c, g, or t
gacccacgcgtccgctamccagaaaaccgaatactccggggtgccatttgtggttcscggagacggttcaatgaattgtatgggtgggacagttattatggagtctcttggggctgtttgggcagcaacagaagttagattttagccgaagtcccattggttgaataamtttctygtttcctgtawttaaaccacttattggaagagattcatygaattgccgaamccgawtcttattaaacttgcaytatcgttcccccasgccgggcawttctttgacctgaaawtggggtccctgagaagtgktatngagscggagttaaaggggcgaaaccccgaattgctccctcggaggtccccctgcgcgacctytccgattacccccgccttgccggatcacagagraataatcaccacgkgtttttgggaccccgsccga

SEQ ID NO: 5842 - DNA, 643 bp, Aspergillus oryzae
  modified_base (46)..(46): n is a, c, g, or t
  modified_base (76)..(76): n is a, c, g, or t
  modified_base (543)..(543): n is a, c, g, or t
gtatagggaaagctggtaggcrtgcaggtacggtcgcggaattcgncagggtcggacccacrgcgtccggacctcncratccrtatcagctcttccatcttctgcaatccgtgtgtcacttaatttactaactctgcaacctgtcacgatccgtgggcagtatccggcagccatcgtctggatttactcttctccgcctgactatcgctgacgaacaactaactgcactcatttgattcgagtgtaacccctgcaacatctccctttttaaccgttcggcaagccatcgcgtgtcgatagcaatcttacccctgtccttcgtctgtgcttccacattcttcccctctcaaaaaccccctcttgtatcacgaccggtgtcctcgctggtccggcctttgagctcctctgctactgcctaccgcgctccctccattcgtgacattacacccagctcagctgaggaatttgctgcgcgtcagaaggagttccgcgagaatttggaggtggctcgcaaaaagaaagtacagcaagagagagaggaanaacagctagaagccaatcaattgcccaagcgcggtcccttgtcttcgctaatctaggaacgaggaagggccagaaatcgaaargaaatcgaacgctcgtt

SEQ ID NO: 5843 - DNA, 236 bp, Aspergillus oryzae
  modified_base (59)..(59): n is a, c, g, or t
  modified_base (179)..(179): n is a, c, g, or t
tctaatacgactcactatagggaaagstggtacgcctgcaggtaccggtccggaattcncgggtcgacccacgcgtccgggtggttagaatccgtgaccggcgggaagactggtcgttttccctttcacatactaggccggcaagaacaaaacgaaacttgagatgcagtgatggctgntacgtatgtatcatgacagacaggaattattgaatgaaaattatgatctcccttatt

SEQ ID NO: 5844 - DNA, 737 bp, Aspergillus oryzae
gacccacgcgtccgcttgtttgtttgacctgtatctagacaggaatttttgtcgggatggcttcttcctccccagccttgtcggctctagagggcccgacctatgtgactgcgcagacgcttatccagcaagtggcgtatgtcctgagtgataagatcttctcctattctccagagtccttcgacctcgatgccgctctcaagcaatgggcctccagccaagagtccaatgccaatggcgaaactcctgccatccaagcaatggaaacccgtcaggcctggtaacatcgcccttggctacctgttttctcaagacttcgaccagccctgttgccgcgcatgttgctgctgtcgactatgccggagaggagggcttggtttccgactatrcgtccgccctttctcttgctgaagagcttggactgggtctcgtttctagtgcctccgttcacgagtcgcagcacatggcgctgctcacgactttactcgcgtcggtcttgccctctgttcatatttacgatggtgttcgcgttggacgtgaaacaccagggtcatcgamgttctgagccagcgggtctttctcgcacctatgaagctgtccgtaagaccttgggagatcccgtagccgtcaccttgacacccaaggaaagctactkgagctgctccattctctttacggtgaactcggcacggactattggtctcttccgagtaccacagccatgttgagcgggtctc

SEQ ID NO: 5845 - DNA, 644 bp, Aspergillus oryzae
  modified_base (22)..(22): n is a, c, g, or t
  modified_base (25)..(25): n is a, c, g, or t
cgacccacgcgtccgsggcgcntgnaccagcctctcgccggtgcccgcattgctggctgtcttcacatgaccatccagactgctgtcctcattgagaccctcgttgcccttggtgctgaggttacctggaccagctgcaacatcttctccacccaggaccacgccgccgctgccatcgccgctgccggtgtccctgtcttcgcctggaaggtgagaccgatgaggagtacaactggtgcttggagcagcagctctctgccttcaaggatggcaagaagctcaacctcatcctcgatgacggtggtgacctcacctccctctgctaccgacgtcatgatcgccggaaaggtcgctgttgttgccggttacgtgacgtcggcaagggctgtgccaaggctctccacagcatgggtgcccgcgtccttgtcaccgagattgaccccatcaacgctctccaggccgctgtccagggcttcgaggttaccaccatggagaaggscgctccccttggtcagatcttcgtcaccaacaccggttgccgtgacatcctcgttkgcaagcacttcgaggtcatgcgcaacgatgccatcckctgcaacattggtcacttcgacattgagaatgatgtcgcytggctcaaggct

SEQ ID NO: 5846 - DNA, 701 bp, Aspergillus oryzae
cgacccacgcgtccggtaaccttctttccgttgcctacaagaacgtggtcggcacccgccgtgcttcctggcgtatcatctcctccattgaacagaaggaggagtccaagggctctgagcaacacgtctcgatcatccgtgactaccgacagaagatcgaaaccgagctggagaaggtctgccaggatgttcttgacgttggacgagtccctcattcccaaggccgagactggcgagtccaaggttttttactacaagatgaagggcgactaccaccgttatcttgctgaatttgcttctggcaacaagcgtaaggttgctgctactgctgcccacgaggcctacaagaacgccaccgacgttgcccagactgatctcacccccactcaccccatccgcttgggtcttgccttgaacttccttaccctttggacttcttccgatggccaggagcccgagggtgctgcttctaaggaagacaagcctgaagaggagtctgcccctgcccccgaggacaagggtgaggaatccaagcctgccgcccctgagtcttaaagcgacaaattggacgttttctttttgtatcaaaaacagcgktgtgcgctcggcscctattttggagagggttcggattctccctgggagtgtttacgatggtctgttttagctgcgtgactggttttgaccggcacgtatcttcc

SEQ ID NO: 5847 - DNA, 205 bp, Aspergillus oryzae
tctavctacactmactatatgggtatgctggtacgmctgayggagccggtccgaarttcccgggtcracccccgcgctccgccatcgcgtccgtccattctcccccctcttcgtggggctctcttcctcgtctctttcgttatttctgcttccccaaaaggctgtcgccgggtttctgggacaagtgaacctggcgacctctggc

SEQ ID NO: 5848 - DNA, 798 bp, Aspergillus oryzae
  modified_base (457)..(457): n is a, c, g, or t
gaccacgcgtccggcagcacaccaaccctgaccgtctggacgaccctctctgagcgtgcccgtdttgccaactcggctatcgaccgcatcgtccccaaccagcccccgaacagtggtctcaatgttcgcatcgagaagttctacgagtgggccgtggagaagactccatttggcgaatggggtcacccgacatccctgccatccactgggtggaccacctcgaaccttacatcgaacgcaagctcttcaccgtcaacactggccatgctaccaccgcctactatgctcacaagcgtggcaagaagatgatcgccgaggccctcgaagacccagagatccgcgagactgtgcacaaggtgctcgaggagacaacgttgagcgtgtgggacgtgctcctctccgcaaactgtctcgcaaggaacggttcattggacctgcttcgcagctcgcaggcggnccagaagttcgatgctctcctgggcgccatcgagatgctcttcgcttccagaacgtcccaggcgacgaggagagttccgagcttgctsccattttgaaggagaactcggccgaggatgccacctcgcagctcaccggattggagaaagaccacccactctactctcatgtggttgagcgtgtgtccaggtccagcaaggctccaaatcagtgctgtgattctcgatcgttttccacaccaccacactccttttttatcaccaraaaacgagggttccgagtccatcaccaatatggatcgsccgaaggatattggatctgatatcaaacctgttctgtccg

SEQ ID NO: 5849 - DNA, 305 bp, Aspergillus oryzae
  modified_base (2)..(2): n is a, c, g, or t
  modified_base (8)..(8): n is a, c, g, or t
  modified_base (13)..(13): n is a, c, g, or t
  modified_base (31)..(31): n is a, c, g, or t
  modified_base (263)..(263): n is a, c, g, or t
cngtcganccacncgggggcccacttctccnccatgtcgttcccgcctgctgaatccacacaatctgcgaatcattcccactatggctcagatcccctcctaagaacaagcccccaggcgatctctcatgcttcgcaggacaatggccagcgtagctgtataacctgtcggaggaggaaagtccgctgcaacaaaaaatgcccgtgtgtcaactgtgtgaaggcgggcattgagtgtgtcttccctccgccagggcgggcacngcgcaagtcgaaacggccccatgatgcggaacttctattgcg

SEQ ID NO: 5850 - DNA, 234 bp, Aspergillus oryzae
  modified_base (21)..(21): n is a, c, g, or t
  modified_base (51)..(51): n is a, c, g, or t
  modified_base (59)..(59): n is a, c, g, or t
  modified_base (61)..(61): n is a, c, g, or t
  modified_base (215)..(215): n is a, c, g, or t
cgcttgatggaccggatcganstttcgggtcrkkcakcgcgccrtakcgtnatataccnantcttattttkcgtgrtgataggwawtaccgaagtcytgggttctctgatttgattcacttggcatcagccratccgkttctcgcggtcgatgcccctccaggccactccggtcgccccggtgccccatggctggccccgttctccgtcctctcncagttatgagcttcacccc

SEQ ID NO: 5851 - DNA, 350 bp, Aspergillus oryzae
atgattagyaactctaatatgaaytactatagggaaagctggtacgcctgcaggtaccggtccggaattccgggtcgaccacgcgtccggcatatcctcccctccttctactctccttctccatcatcgctcgtttggcatacaaatcgtattgctaattttgcgctgcttcttgtctcttttcgtctgttttgcctctctttcacttcatacgctcccttgcgactcctttttctgaactcactcgcgagctgctattgtttcttacaatccattttccttcactttttctcctcatagtccatacagctcttcccttcccctgccgtgtcttttgaggccgaggaaag

SEQ ID NO: 5852 - DNA, 321 bp, Aspergillus oryzae
  modified_base (316)..(316): n is a, c, g, or t
gaacttttctctacaacagtcgcaatcatgctaacgataaaggagtggaagagatccctgagggacagatcgagaccaactacgatgagatcaccgactccttcgacgccatggagctgaagcctgagttgcttcgcggtgtctacgcctatggtttcgagcgtctctctgctattcagcagccgtgccattcaagcccatccatcaaaggtagccgatgttaycgctcaggcccagtctgggtactggaaagacctgcccacttatcctccatccccccgctcctcccagaagcctcgatccccmattgtttaanggggc

SEQ ID NO: 5853 - DNA, 294 bp, Aspergillus oryzae
  modified_base (191)..(191): n is a, c, g, or t
  modified_base (211)..(211): n is a, c, g, or t
tctgaacactgagtcgcagttcgccaggsctacgagagggcctgaacaaggcgattactgggagccacattcgacgacagcatctcgttgctggcccagattcccgtgtcgccgcatggtctccgcccgagagtcgacgctgtgggcaccaagctctcgacgtgacyaagatggtcttcaattcgcgactnatcgccaaagtggtccaarnaccaggmtcccagattgctgcgtctgtcctggcctscmagtgaccmgaggcgtaagtgtctcccaagctmaccatggttgaag

SEQ ID NO: 5854 - DNA, 493 bp, Aspergillus oryzae
  modified_base (26)..(26): n is a, c, g, or t
gcgaacgctaatacgactcactatanggaaagctggtaccctgcagtaccgtccggaattcgsggtgcasscagcggctccgcccacgctccgcaagagctcgtgcgcacttaaaccgaacccttgcacagttcatcaatacaaaattgacggcgamttaaccgacagctggaggaaccctgatcgtagcgagcagttgccttgccagctggaggaagatcttgctcgtctcttcsctttcctgttcccatttgagacccgccatttgttccttcagtcgacggcttttggttactcgcgggcgatgatgaggtggcacaattcgcaaaacggcgacgatggtcggaacgatcaccgacgtgatgatcgaccgttcttaggccgcctccagcgacaaaaggtgcgtatctcaagaagccgtatcctagagtctgctatgaaagttatggaactctatggctcttcgccgagcgtcctggaagtggaatacttt

SEQ ID NO: 5855 - DNA, 520 bp, Aspergillus oryzae
tcgacccacgcgtccgctcaagtcccaaaagtacatagagtacagggcacggcctcgcgagatactggaaaggatggggaactgtttggtcagatgagcttgaggatgctttccagcaagcccttgaggcgaatcccccaatggggagaaggaagtggtccgayadcaggaaatcctacggtcgaaatgaactcatagccgagtatatctacaaaactactggcaaaaggaggtcgagaaagcaggtgtctagccacctgcaagtccttgattcttttctcaagggggatcccgattgggagaggcttgtacgggagcaaccagcagaccgttcgaatggccagccgccatcagccggtcctcgctggagaaattcactagagcttccattctccagccattacaatagtcacaattatccctcctatcatgattcgttgaggccggtgcaatcttactccggggagttgccccctccacacgttgttttccatccaaatttgcacgccgaggcaacgaa

SEQ ID NO: 5856 - DNA, 468 bp, Aspergillus oryzae
acgcgtccgaactccctcaaaatgagacctcacgtcctcctccccttcctccttcctttgacaaccgcaaccccaagctccaagacttcgacgccctcggccttggttcgacggcatcaacgccataaacaccaacaatgaaacacacaacttcacaaacaaaaacaccacaatcgccatcatcggcgccggcatctcaggcctcacagccgccctcctcctcgatagcgtcggaatccacaattgggaaatactcgaagcgagtaaccgggtaggagggcgtttccgaaccaaactcgtagggaacacaggcgaatgggccgaratggggcccatgcggctgcctgttagggttcggtataacgacggcgagacggtggagtactcggaccatgccatggtgttccagctgtcggagctgttaaataatatgaatkggaatgagagcagtggtagattgatttcatt

SEQ ID NO: 5857 - DNA, 381 bp, Aspergillus oryzae
aagctggtacgcctgcaggtaccggtccggaattcccgggtcgacccacgcgtccgctctttccctcatccttccttccctccacctcaattcctccatatcaatacacaatggctgctcgtggactcccccgcgccctccgcctggcccgtgttgccgctcctcgctccgtcgtctccgccgccctccctcgtcccgctctggctaaggctgctgcaatgccctcccccgtgtgactctgtcctctactcccgtccgtggtgtcaagaacatttccttcgccggtcacgaggagaccgtctacgagcgtgaggactggccccgtgagaagctccaggagtacttcaagagtttgyttattgggtgggattccaccggatt

SEQ ID NO: 5858 - DNA, 380 bp, Aspergillus oryzae
gacccacgcgtccgaggaagaccaagggtctgacgttgcctctgctgccgtcccggatcaacccgttgctaaggagcctaccgagaagttgacattgcaaagtttcgagtcgaacaaagatatcacatctgtgaatgacaatgctccaacaacagttacgcgcgccaaggcccgccagaccccagtgaggtccttatcaatttcaggggaggaaagagaagatggtgaaggcttagatgatgatgaagacgaatatatgttaaagatgctttcctggttttccgggctctatgcaagctgagtcacaagattctgagccacgaacaacagcaggatttgaagtctcaaaacatgagatcaaaactgttgtccctgcacca

SEQ ID NO: 5859 - DNA, 516 bp, Aspergillus oryzae
  modified_base (189)..(189): n is a, c, g, or t
  modified_base (216)..(216): n is a, c, g, or t
tcgaccacgcgtccgaacagagctaccataagctctcgttttcgcgttttgtctggtttctttttcggtcggagcgattgtagtcagattcccttgagtcatctgtcagcaattgctttttcttaattatcgttcttgaccattttattctccgagccctgccccgctccagatctcactgacaagtgntcgatacaacgtgcgattctctaccanctccagagttgtgcttgcgattgcgcgtcagacggacacctggagctcttgtaattatccacagcatgatctaaaacgacttatcgattttcttcacgtcgaatactgttgcaattatcctggttacacttagatcccgtgcgactctccaacaatggccgaacctggctatggtggatcgtcaattgtggaagactgcgatgatactccgctagaagaactgatcggcgaatctgcagccgcaargatctcattgacctggaattctkgaacacttccgttgagttcgtcacggatggt

SEQ ID NO: 5860 - DNA, 520 bp, Aspergillus oryzae
cacgcgtccgcccacgcgtccgcccacgcgtccgatcaccaccacggagagagaaagagagtgtgtgaagagttcttcacctcgcctcaacacgtcggttctcttctcgtcgggacgtgctacatttcttgggcaatgctctccaagtcgataaatgggctgtaattgagtattcgatatcccgttccgcccaattacccctactcgttccttcgttacaattgggttgtcggtccttcgtttcgcctcgccctttacaccttccagcagtgctacgttccctcgccgattgcatttcgggtctctccaattggaactgccctacgatcgtccaactgccatttccatcaattaatttttagtatcgaccaggtctcgaccccagtggtagtgaggcccaaccaaaaagcacaaagaaaacccgagattatatacacccaaaaactctatactcgttacttgtttatatactcccattatgcctccgtctctgagagaacagtcctcctcctttgcccga

SEQ ID NO: 5861 - DNA, 786 bp, Aspergillus oryzae
  modified_base (657)..(657): n is a, c, g, or t
cgacccacgcgtccggttgctgtcaacgaccccttcattgagactcactatgctgcctacatgctcaagtatgacagcacccacggtcgcttccagggtacatcgagacctacgacgagggcctcatcgtcaacggcaagaagattcgcttcttcgccgagcgtgaccccgctgccatcccctggggctccgctggcgctgcctacatcgtcgagtccactggtgtcttcaccacacaccgagaaggcctccgctcacttgaagggtggcgccaagaaggtcatcatctctgctccttctgctgatgcvcccatgttcgttatgggtgtcaacaacaaggaatacaagaccgacatcaacgtcctctctaacgcttcttgcaccaccaactgccttgctccccttgctaaggttatcaacgacaacggccgtcacctacgaggacatcaagaagaccatcaaggctgcttccgaggarggcgagctttaaggcaatcttggatacactgaggacgacattttctccactgacytgatcgagatgcccactcctccatctcgatgcccaggccggyatcgccctcaacgagcacttcatcagcctgtytcttgtacgaaaacgagtgggytcttccgccgtgttgttgacctcattgncttacatyyccaggttgatgggcattaggawtaaggamggaaacagaaacttaaagtgttctataaacaaaaaactctrttccctggctgtgktcccagttcccggataataggtccccaccccttgaa

SEQ ID NO: 5862 - DNA, 673 bp, Aspergillus oryzae
  modified_base (517)..(517): n is a, c, g, or t
gggtcgacccacgcgtccgtatgcttcggatttgttgaaccaggtaagtgcaatgtcaatttctgacttggaagggcgcgtcatagaaacacaacagctggagtgtaaacagaagccccctctctccacacctctctatttctcacatttccctacattactatccatccaactaattccacagcacacacgctgaagcccatactgtatcaagcttttatctcttcatctgtgaacctctgttgttcttgaagagggagctcctctattaggtagatcacttagtgaaccttttcttctgccgctctgagcttcgactaagccaacagtcgccctcagtcggcaatccgttaaaatgcgaactcgatcgcagcaagcatcgcctggcggctttctatccctcgatgacagcgctccaccgtcggacaaggtctacaaggaacacctcgcaacctaacgcgcaatcttcatcctctacaaaaaccacaactcaacccaaaggccaaggcacgactandaggactaccacaagcagagtcgcaaagacacagacgcgaaaagcccctcagcgagcgacgagawaagtcaactcgcaagacggagaatcawatggcggaatggtagcccacactgaattycaaaaaaattggagaaacgcgcccagaaccgcgcc

SEQ ID NO: 5863 - DNA, 705 bp, Aspergillus oryzae
  modified_base (357)..(357): n is a, c, g, or t
ccggtccggaattcccgggtgcgacccacggcgctccgcaaagccatcgcccctgcctatgagcagctggcagcccagctgttcacgcccgaaccgaatcaccttcaccaagatcaacgtcgatcaccaacaggaccttgctaaggcctacggagtgacagccatgcccaccttcatcgtgttcgagcgcggccgtccaasctccaccgtcaaadgcgccgaccgcgcgcagaagctgtcggaggtggtccgcaaactcgcatcggaggccagcaaacccgacgacggcggcgagggctcatcaggcagctccgacgcagattggatcgggctggccgcaccgaaaggctacgccgnccatcacggaccagtacgatcccaagggcctggagctgctgaaccgggacagcgagttcggaacggcgaagacactcttcgagacttcgagccgtcgggctgaacaacggcaagggaaaggctaaggattgggtcgagagcgataccgatgaacagcttatgctctttgttccgttccagtcgacgctcaaggtgcattcgttgcagattacttcgttgcctcccagtgatggtgatgagcttcccatgcgcccgcagacgatccatctctacacgawrcgcgtcgcatgtccttgggtccagacgaggcggagggtatcgatcctgtgcagacggtgaccatggagc

SEQ ID NO: 5864 - DNA, 541 bp, Aspergillus oryzae
  modified_base (46)..(46): n is a, c, g, or t
  modified_base (48)..(48): n is a, c, g, or t
ggtaccggtccggdattcccgggtcgdbccacgcgtccggctygcntntccacagcgcttatcgccgagctagggaaattctctgatcatgggggacagagacactctagcgggccttcgtggcttgtaccaagatctctcttccctcactgagtcctccttcgtgaacatcgaccgtctccgtgttgagttggaggctcacatcgatgatttcaggaagctccttgacaggccaccaaaaaacaattccagtcgccaagctgttctctcaggaaagatcaccgtcgatgatcttgaatattccatcaacgaggagttccaacaaggcgcgttacagttggccgatgcgctgggtatcgatgaattggaggcagcacacctgtttcttggcgcacaggatcatgctcagatgctggacagaacacctcttattgctgcaatcatgcggtttcacgagcgtcgacacttcctcctcgaatctctgcgtcttatcctccaagatgggattttgacgaacgtcgttcccaccttcccggggtcg

SEQ ID NO: 5865 - DNA, 749 bp, Aspergillus oryzae
tcgacccacgcgtccgtttccttttcactcttttgcatttcttcacttcttacattctttactttcatccccccattcgctcgctacagtcgatcgttccactcttttaacgttcgacttcactctcacgagcccttcgcttgcttccctctggacggtgaaatagccctcgatttgtcatcgcgatatcgatcctcgattcatgcgattcgattaaccgccacgcttgcgaagccctatatactttctaccgtataagctgcctaggtcagctttttatctttagccccaattcgattacgttgacgcttctggacgcgctcatattcattcgtgcttgaggcctggaatcataaccgtttccagccctagcacatccattcgtttgaaacatatatctctctcgcgcttgacgcagcttgagggacttggacatccccctcgactgtcggccggatcgtcgtcctctctttttcgttcatactcccatctctcaattggtcgattctcttttctgaacccacttctaccttatcttcggtcaatccctgcaaacaatgtcttcgacagactcccctgaccagtcgactatgtctaccccccaccaccacagcaccgaccacctcttcaattgccgattccacgccgtctccatccatatccaatgccaccacggcgcctcttccgcggcccgtcggctcagcgcaagagtactctgacccaacaacagaagaataacaagcgtcagg

SEQ ID NO: 5866 - DNA, 670 bp, Aspergillus oryzae
ggtaccggtccggaattcccgggtcgacccacgcgtccggatcgactccatcttcgagaaggacgaggtgatcgacgttattgctgtcaccaagggtcacggtttccagggtgtcaccagccgttggggcaccaagaagcttccccgtaagactcacaagggtctgcgtaaggttgcttgtatcggtgcctggcacctagccacgtccagtgactgttgcccgtgctggtcagatgggttaccaccaccgtacctcttgcaaccacaaggtctaccgtatcggtaagggctccgacgaggctaacgcctccaccgacttcgatatctccaagaagcagatcactcctatgggtggcttcgtccgctatggtgaggttaagaacgacttcgtcatggtcaagggttccgtccctggtgtcaagaagcgtgtcatgaccctccgcaagaccctctacccccagaccagccgcaagcaccgagaagatcgagctcaagtgggtcgatacctcttccgaattcggccacggtgccttccagacccccgaggagaagcgcgctttcttgggtaccctcaagaaggacctcgttacttccgcataaggtgtttatggatatgatacggtgtagtgcaaattatttattttttcaataaaaaagcgaataccttcca

SEQ ID NO: 5867 - DNA, 537 bp, Aspergillus oryzae
  modified_base (35)..(35): n is a, c, g, or t
  modified_base (37)..(37): n is a, c, g, or t
  modified_base (43)..(43): n is a, c, g, or t
  modified_base (45)..(45): n is a, c, g, or t
ggaattcccgggtcgrcscabgcgtccggcdcggnancgctgncncgataccctaagtgatactaaaatcgaatcaccatgaaggtctatctctggacggtggcagcaaccgccactctctcctcggccttattcattcccacctcccaacaagccctaaaagacctcgacctcaacaacatagacgtaaacgataaggccgccctcgacgattacctccttcaactctcactattggacgccgcatccgaaatacaaaacagtcgcctagacgacatcctccccccgatctttgacacagtagacgcagaagactacgactacgactacttcgacgatgacgactatgacgacgcagaatacttccccttggacatcaccgagctgcctcccttctcccaactacatcccccacaccacccgccctccgacaagaccatctacgagctcatcactgaaagcaaatacaccaccatcctggcgasttatcaaagaagacgaggaactagtccatctcctcaactcgacagaagccaa

SEQ ID NO: 5868 - DNA, 434 bp, Aspergillus oryzae
ccctaagggaacaagttaatttcatgcttcttattgtgttaagtgaaataagtgcgacatacctgcatgcaaatatcggaattgctcataccaccatcgacggcgagttccgacaatgcgtgtccgctatccatctccatggcattcgtgcgcgaaaataatagagaaaaagaacagaaagacaacgctaaatcgcaagtttcatcccagaattatgtatataggtggggtcgaggattggtctcgtttgtcgcttgtagctctgcgcggcggagatatggggttggaatgttgtgcgattggcgcggttcatgttcttgagctcgctaaagtccttccagatatcaatggcgaatgcgccgcgattgcagcacctagagcggtagtctcgtgcatcgctggccgttcaacagggatctggataatatctgcct

SEQ ID NO: 5869 - DNA, 420 bp, Aspergillus oryzae
atcgcacacaagcatcattacaaagccacttcgagaaacctctccaaactttccaactccaacacaatgtctccctgctcttgcaactggaacgacactcaatgtgctacagagcacctgtcctattcccggctcgacttcttccctgcctctaaagccttcaatccatgatttccggttcgatctcgcggttgccaagatttctgcagcggtaactgcgctagctgctcctgctcctcctgcagccattaaggttcgaatgagtactgggtatgatgggatgaacaagttaacgggatggaccaacgccgagaaatccacgagcatgtatgattctgtcgctttttgtatcgcctcattttagccaagatatgtcataggcaatataaagttgcatgccgtgagggttaattgcgcttg

SEQ ID NO: 5870 - DNA, 454 bp, Aspergillus oryzae
ccgcagtccggatatcgatcatcatctatatttgatagagtagagcgtgggtttgattcctcgcgagctactagccccgacagcacagccttttcattacgccacatctgagagagccttttctcctgcgcctgatgatgtatttgcttctccttatcgcccgcggggccattaagggttagtcgacgaagaattctctgttgcaggcatggacatccatactcccagtcgacgtccatcgcggatggaggatgtctcgaggcccttctctgctcgcgtcccgcgccgtatcttttctagtaacgatcggttctccaagcagcttctatgatgctagttttcgatctcctgaaacggatgtttcggtcgatcctttggatgatggcgttttcaacaagggtcatggggatgcgtaccagcctgtcataccggaggaacgggaggactccgtgct

SEQ ID NO: 5871 - DNA, 486 bp, Aspergillus oryzae
caaccgcacatatcaccacatcaacacctactctccctactacaactgctccctccccaattcaaccaggaacccccgacaccactactgtgtcgcagtgaagaccgctcagccaatgccagacaccattgacacttgcaagaaatggcaccttacagaggatggcgatggctgctggcagctgattgtcatgatccagcacgactttcacatcagtcccgatgatttcaagaccaaatggaatcctgcgtctcatactatgaggtccaacccggagacgactgctggggcatcataaataaaaggttcacttacctgaccgaggaccgatactatatatgcattggtgtgtagggatgtgccagagagcttgatttacttgagatctcataattcatcaagtggaatccagcggtgggctcatcgtgcaagattctactgggctgcatatcggcgctttgtggcttgttctgcctaagaatattt

SEQ ID NO: 5872 - DNA, 401 bp, Aspergillus oryzae
gataacgagcccatctgggaaggaaacagcactctcattgacgaactggccacccagctccctcccccagccggtgaagatgaagaggccaccgcccgttacccgtggatgccatcatctgcacggcggcctcctgaacggtctagtcatgggcatcgaacgacacccatcgtggccgccagctccagaagatgagcctcagctatgcttccaactgtgcttcgtcttgctgatgatcaccggacgcttgtcgaacttgcatgcgggcgtgggcggtgtatgcgttgaggctgcagttggtgacgcggcgagagctcggccatcgacatcctccgacggcctcacagctggaactaagaagcgcaagagagaagatgcggattacccttttaatttatgct

SEQ ID NO: 5873 - DNA, 507 bp, Aspergillus oryzae
gtcgacggtatcgataagcttgatatcgaattcggcacgaggctccttcccacattcattatctggtattcgccgtggccgtcccccacggccaccagcactcccatgtgcacgtcacgaagcgctcctccagcacgacgcctcgaccgtcgagaccctagcaacggcgccatctcctgggcctacgactggaacatgatcgcctccggcagcctgccctccggcgtcgagttcgtgcccatgctctggggccgcaagatgttcggcgactgtcctgtgccgtgcaggtcaatcagtcattcctttgagaaagtaccgcctgaccaccatcaagcgccactacccgaccttctttatctagagaaccggtcttctcttgtttgcacaaagtttgaggaaatacagaagaaaaaaagtcccatcacaatggtctccttcaccaagctcatcgccgccggcctcctcgcctccgcagctcccaaggcggcatgaccccctccgaagccg

SEQ ID NO: 5874 - DNA, 455 bp, Aspergillus oryzae
  modified_base (381)..(381): n is a, c, g, or t
gtcgacggtgcagatgaacatctgtcaatctatccgcttggacgtggctctgaatgatctctggtattttgggcggtgcctagtggccagactggtacatgagatactatctcaatggccaatcatttgtatatgtacgagaatatctcccgcggatctactctaatcacaacagtagacctctgtcggattccctcatcgagcttatggccccaagcgaacggtggattcgagctgtgaagccaccagcggacgggggcaacggaatatggctcgtcctggcgggaagaccgaagattatgactgtacgaggtttcatgagatggaggaagggattgtcaactggtagcctatgatggtttcagccggacaggtttccgntgctgaatgagtagcggggccaccatcgattctgttctttgccaaactaatatatatgaacatccatccacctt

SEQ ID NO: 5875 - DNA, 386 bp, Aspergillus oryzae
cgccccarctgcaggcatgaatccaggactggatcaaccacacgcgcagtagtcgcctattgcttaaccagaggacataccccgatcgtctggtcgacggcgggtctgacattggtaccaatgcgggactaccattagacgatatcgaaacgacagctcaccatccacaacggtttccctggtctctgccgacaccatgacgatacccctggctcggttcgtgaaatgcattggttggaaatgcttcgcgttattggaggcttcgaagcgttcacagccgtcagtcaactgcgcaaggcgcgaaagcaataccttgagcgatataagtttgatgcacttttccttccggattccgctcgtccttctcccagcaagtatgtcaaata

SEQ ID NO: 5876 - DNA, 462 bp, Aspergillus oryzae
ttcagctgcaacgtgagcttttcttcgcttccggtgttccttcccacgatcctgaaggacatggggttcacttcccaagggcttacggctccgccctatttcgcttctgtcacgattgccaccacctggattgctgatcgattgcaacaacgtggcttgatgcggtcgcaggcgtgttcctcgctgctataggtgttttcccttgcatcgcaaatattctcccgtgctctcaataaccaatgtaatcctgtctctgatcggagctgttggctatgttctccttgccggatcaacgctctgcacgtcagttggcgcgcgttaggctcggattcacttcttggacgtggaatgggtattgtcatcctcaatatcatcggccaatgcgggcccttctgggaacaaacgtattcccagaaagcgacggaccgcgctacatccgcggacaatccatttgtgcagcct

SEQ ID NO: 5877 - DNA, 671 bp, Aspergillus oryzae
  modified_base (416)..(416): n is a, c, g, or t
  modified_base (476)..(476): n is a, c, g, or t
  modified_base (479)..(479): n is a, c, g, or t
  modified_base (517)..(517): n is a, c, g, or t
  modified_base (613)..(613): n is a, c, g, or t
  modified_base (627)..(627): n is a, c, g, or t
  modified_base (634)..(634): n is a, c, g, or t
gttaattatgtccctggtgactctgacagtgctctcttcgggctggctgtgcgtcaatttcttgctggtcgagtcgttgctgcgcttctacatgttctacggcgataaattcaatctaacatgcttcgctgtcagcataatctaactatatgtacagaatcaattgcaggttgaatgtcctacagggtccggagaggaaatagcaactggcgcggaccgggtcgagcggtacacgacaactcggaccttctcgacttcgatgagcactggaaagattacatgtggttccacgaattctttgacggtgataccggacggggccttggagcatctcaccaatgcggctggactggtttgattgccaagatcatccatgacactgggtaagtgaaccccgcattccgcaaaccccacgntccccgtttgcggcggcatcacactactttgatgatatcttcagccgttctcgaccacgnggnagcgtcgacctagcgtccgtcgatcgtctacaagtcgntctatcgggatatatatgcatctcgggcaggttgccgaggaaatccaacatcggttacagcatttgtttgcccgtaacgatgaaggacaccgaagngactttgaattggnctttggngacaccacaggtgcagaaagtgtagtcgacgatgaag

SEQ ID NO: 5878 - DNA, 493 bp, Aspergillus oryzae
cgagtttctcaccagataatcaactatcctttcaacctaaagtgacttctacaagcttttcgagctatctgcgcgctctgtatgagtgccttgcaatgggtcagtcttgtctccggtgcgtcgagtttgatcgccgcagcggttctcctccttctcgcttttgttcttcatccttcgtcatgacgttcgctgaggaattccgctcgagaaacttcagtatctacggacaacaaacctaaatggacgggtgttgtatgcattgtcctatgcatcttggcaggcttgaagagccaggagcgccctcggcattgccaacattttttcgtttaacgccgttcgcatcgtcttcagcatcttatgccttgtttcgggattcgtcctcgttttcatcgaggtgtccggtctcttttatgctttgttggaagtaagaccttgggtggccaagggcttgcgcaaatgattgtctaggagaagtcaacatggaatcttgtga

SEQ ID NO: 5879 - DNA, 522 bp, Aspergillus oryzae
atgcacacctgccgctcagtatggtgttgtgtccgtcgagatctcgaaacaatagcgatggtaaacgatgattccaagggttgcatgcaggtctgatgactgaggcagaggcacatcgtgacagttaggctactcaggcaaacatgccagggagaacagaaactgtcatcaacagagtatatacacagtctactcttagtctatcccgagctttcggaagttcatctctaagcactgaccgctcgctgtcttgatttactgttgcaaagaggaagcttgaatgcgacttttgtcgggaacatcgcaagtaaaagtgtgacttgctctcaacaagccagttgtgcttaatgcgtcagggaagatgcatccgggtctggtacatattcccttcggtgattccgaacctttgacaattgttgctgctgttggtaacgtatacctcacaggtctttccgaaagaacgtcgtctcgccctacccagattcaacgggttgttttatatgcatctattgcttcgattct

SEQ ID NO: 5880 - DNA, 522 bp, Aspergillus oryzae
attcagcggccgccaccggctccctttagtgagggttaattgcgcgcttggcgtaatcatggtcatagctgtttcctgtgtgaaattgttacagtcgggaaacctgtcgtgccagctgcattaattccgctcacaattccacacaacatacgagccggaagcataaagtgcgctcactgcccgctttcgaagtaaagcctggggtgcctaatgagtgagctaactcacattaattgcgtttcggccaacgcgcggggagaggcggtttgcgtattgggcgctcttccgcttcctcgctcactgactcgctgcgctcggtcgttcggctgcggcgagcggtatcgagcatcacaaaaatctccgaccctgccgcttaccggatacctgtccgcctttctcccttcgggaagcgtggcgctttctcatgacgctcaagtcagaggtggcgaaacccgacaggactataaagataccaggcgtttccccctggaagctccctcgtgcgctctcctgtagctcacg

SEQ ID NO: 5881 - DNA, 458 bp, Aspergillus oryzae
ctcagagcaacaagagcacactcagccgctcaagtttctgcattccgcaaagcgatcgagtctgttaacaattggtcatcttggggaacgccgtcacgccgttcacctgtcgtgtccctcagcaacttgagaaggaccgcgcgcacggtggcccggaaacgcgccgctttgatccctttcactctcattctcatcgtgtgcggggagatgacacccttagctgtcctagcagttgcgcagaggcagccaccagcgggtccgttacgccgcctgccgcgggatcggatctggagctggatattctggtcaagatgtatacaaatctggaatggatcgagagtgcgagcgcgtcgcgctgcctacgatgtccggcgcccgaggaaatcctgcgcgcgtgtgcggtgctgaatctcgtgaagacacatactagatcttccgtgttactgtcgctgtaccgg

SEQ ID NO: 5882 - DNA, 346 bp, Aspergillus oryzae
ctccgaagtatcggcaggaaatccagcagatgatgttcgtctctggtgagactggtgtcgtcgctgggccccagatgtcgcttcgaagccgaaaaataagagggcccctgttggtctcgcatgggatgtccgagccatcagtggaaacaactactctgatagaagagatcgttcgccagcaagtcgttgagattctcgcacgcagtacaacggtggcaacacgacgaggtgttcgctctatttccgactgacgatttgatctttctcaaagattcagatgacaaaggcggtgcccaccgctgctgaatttgcaggagcccatgaccctcttgcagggggaacagtt

SEQ ID NO: 5883 - DNA, 355 bp, Aspergillus oryzae
caacaatcctccataatatacggcatcccccgatccaaattagcctcgcaatctcaatccaatgccccttcctcctctacgctcgccttcacgacagccctatcctccctaataccaaaaccaacaaatcagacatcttcgggcgccccaacaaaggcgcccagaaacgtgccgccgttgacctccgggacgatgacactcaccaaacaaaccaaacaaagacggcgacacctttacccgaggccgaccccgaccatgggatcccaagacatatgggggcgtagacaccgccacgtttcaccgttccaaggggcggaagaaacaaaggacgagtatctcgcgcgactacgggggg

SEQ ID NO: 5884 - DNA, 542 bp, Aspergillus oryzae
aagacgtccaccttcgacctgtcaggccgcaaccaccatgttccctcaacgcaaccttcttcgtctggctcagcgctctgcgagcagcagcgttctgtgccattcagcgccggttcaacagcaccgactccaagcttccctggatggtcgacaacgaattcaaccgtgagagagcggctgtcaagcacctgcctccaccagtgatctctggcgcaagctctctatctacgccgttattccttgcctggctccctcaatgcttacaacctctgggaagagcactgggagcactgggagcacatgcctcctcttgaggagcgtgtggaatacccataccaaaacatccgggtgaagaacttcccctggggagatggtgacaagaccatcttctggaacgacagcgtcacaacaaggataaggctacctaaacctttccacggacgatgttacagccttcaaccggctgttgataaatgaagagttttaccaaagtgcaggtgttgacttagtcgttcttgtcagaaatgaagacatgtatcatt

SEQ ID NO: 5885 - DNA, 652 bp, Aspergillus oryzae
caagagcctacctcataccctcgcttccaagagactcccaaggtctacgatcaggagctttccaaccagctagacatcactgagcgtgaacagacctacgacgtctataacaccaacgctagctatcagcagtctagtgtagcgtcaacccgtctcgtactcctgcccacccccagctcgacgtctcgtacgacaaggcttatcaagctcccaccctcgagacctaccccggctcttctcgcagccaacgtcaggtctctgtcgagccagtcaacccaccttctcaagtcaaggttcttagcgttgattatccccctgctcgcaagatgggatactacgccgccgccgtttcccgtgacggtgcccaccacgccgtccgcgtcgttgagccccgcagcagcgctcgcagaagcgccgccaccgtgcccattccctgcaacttcattcgcatctcctcctccagggccgtccctgccaggtcatccgtatctccgtgtcgccccagacccgccagcaccctacctcggtgtcgatctcttcacccgccacactgcaggcgcgacgtccagctctcgcctccaacccctccagcaccatgcttgcgcccctctctacacgcccctacccccatcccctccgcccatcccgctgc

SEQ ID NO: 5886 - DNA, 429 bp, Aspergillus oryzae
ggacaatcggtggtggtatgcctggcacatatcgggaggccagaagacaggcagtactatataacaacgaatcggtgttccgaggtcctgaattagccgaacggtcatctcgttgtggaagtccgactgattatttatggacactaaagggccgaaattatccacaaatctagctcaagcattacagctgtaccaacttgagagacaacttagaatctaagatacccttctcaaaactgttacccaaggcggctatagaggcagatggacatgacgagtgaccataaaaggagattcaacagggatgcggtttgtctccccaaaaaactcagattggtttaggtaggaaaggaccgaatgagtttccttcaatggaggccgtttcttccgtatgaacactccgagctagcggaggggacggagatatta

SEQ ID NO: 5887 - DNA, 444 bp, Aspergillus oryzae
cactttcaaaccgcatgaaaaggggttcgcaagctctcaattgatcctcctgtctccaagcaaacttacattgagctcactccctcatacttaaactattctttctcaacactgtcaccgagaacaataaccaccgcaaccgaatcaaaatgtcttcccccgacacctccgtcgccgcagaggccttgaaggacttttttggccaattatatacgttcttcgagacgatgatcgttcggttcttcaggaagagccaaaacccctcaacctctctttttacgacctccgcggattcccgcatctcttttatacttttataactctttcgcgacaggtggacgaaggtcacactctcggtgatcggttacattataattcgtccatatatcgaagcctggtttagtgggcttcaaccagaaaatgagtgaacgcgatcgcaagaag

SEQ ID NO: 5888 - DNA, 722 bp, Aspergillus oryzae
gcccatcatcccgagcaccccagcggctctatcatatctttcattgacgactcaagcatccgcgattggcaacggaggcttaagtcgaccaccccgcagacaccggtaacttcgaagagtatcccgatccggatgtgagaagtcaaaacgtttataccgatgatctgaagaccttcactgaaagatcaggagcaatgctgcgcatgtctatgtacgaacgatgttcagttcgttccgcaatacccccgcctcatgcttagcagccaaagaaaaagtatgaggctttgtttagcgacttttaggcaccgtgcccgaacaaactcaaatatacaactgaacaaactgagatatgatattttctttgctatttaactctctttgatgccagtgaaacttctttgtagaagtccccgtcgttcagccagtgcctcttgtttccatactgtccattgccatgcgcccccctgttgactgcttattcacatatgcatatgatgtacacccttctgtgaacgtactgctgccacgcgatcaggtcgatttcgtccaaccggatctattatcgcaagggaggcttccaatacgttcacggtcgcctgacgactctatacaacatgctttatgtggccttccaggagctgctactaatattttgtaccaatgatcatcggtgacccggatggtctttgacacatcagcctcaccgttcccacaatagctgg

SEQ ID NO: 5889 - DNA, 526 bp, Aspergillus oryzae
cgccagtcccgagggtgcctcgagcaacttccctcaggatccttccgaattcgacagcgacccgcgcatttccttctcgaaactggacgacaagttcattttggaaacagatgatggtcggagtttgaatacgatacggctttgaagcgatggattccgacggtgtgtgcgcgctttctctcctatgactgcaaggactttggatggttcgtgaactgatctcgtggtgggcgccgcttttgcgcgcccgtgggtattctccaggtagatgaacaactgctccgacaacaacaagaagcctataaagttgagggcgtagatgacaaaatcctgctctgctgttgttttctattgcgactgcgcgtgaaagcgcccaagaaccttcttccgttgcaaatatgctgggataggcctggggggactaacattggtggattctactcaggggaacggccaaaaaccgaagaaacagcgcgtatgacgaagtcacggcatcgcaactcaagaaaaaacgcaagcaacaagc

SEQ ID NO: 5890 - DNA, 520 bp, Aspergillus oryzae
actatttgcaccgaaagcacctccgcatcgggaatatcattcgatattgctagccaagatgtcgcaaagccatgccctttccgacgatcaggtcgcgggtgagctccgcaagatgacagcttgacttgcgctacctggtccccacgtccttcgactccctctaataccgagattctgggccttcatccggcaggcgattgagaagtcaaagctcgtccgtcaggaaaccgctgccatcgacacactgtacgagaagaaattcaagcaggctgccatgtcccgaagcgctggagaaggcccgtgagatcgaactgaaagccgatgaagagtttatgagctgttccagcaggctcgtgataagatttccagcatcgcatctaaggatgctaagaagtatgaaactgtacagatcacccgctccaccctttcaaaccgtactcgtctccgtgttctttcttctcgtcaggagcttcttgatctgcagggactgattctcgagggcttgtacgctcttaatgag

SEQ ID NO: 5891 - DNA, 732 bp, Aspergillus oryzae
gattatttagctagcactatgcctcaaagtatcgatttttatatcggtcgtgagctgaaccctcgtgtgtctctcccaatcttcggcgaatttgacatcaaaacctggtgagtttggtggacctttgggtgctgctgccatcaccgtgggtggtgcttgcatattacctcctcagcatgttcctctggaagattctccctgcacaagaagtgcgtggcacaaagttggttcaacacgatcggccgttgacataccgctttaactctttctcgtctagcgttgttcagggcctccccattctgctctatgtctttgcctttacatgcaacgatgtaactggctgtccagtaccatcactactaagccctcgtaccctgagctgggggaggctaaaatccgagattggacggcctcttgggggcatctggggtctttacagttgggaggtgacgggctagctctcatactgaactgcatgcgccattggaacatatctcaagggtgcagactttgttgtctggacgtacatcgcggacaattatgtgcagctattgatgcgccccggcctgactgggtggatattgctcaacttagcaaccgccaacattctgatatcatacgccctttccgcgtttgtatacgtacgcagcttcagcgtggacaccaattatccaaacaaggagcttcgtgagttagctgctggtggaaacactggtaattctgtatagcgag

SEQ ID NO: 5892 - DNA, 738 bp, Aspergillus oryzae
caacgatccacccttacgcctgttgaactttaagccgaagaaggctacaagtctaccggcctaaagccaatgtctcgcagaacatatttttgagcgactagttgagaatctcgtctcgtagacccgaggtctctttttataacttcaacttaatattacaagtgatacatatgtgccaccactactaagaaggctgagaaggccgagaaggcgagaagcctaagacgaccaccaagaagactggcactactactactaccaagaagagtgtcggcagacctaaagcgaacaccgcgaagctcgcaaagcatccactactgccaccaagttttggcaaacaacaagattgcacctgcatctaccaatgctttcgatagccagttcaacaaggctattaaggcaggtgttgagaagggtgaattcacccaacccaagggtccttctggaccgtgaactacccaccctaacgatgcctccaaggaaggcttccaccggcgcagcaagaagactgcctcgactcatgcttcctaccgtgatatgatcaaggatgctttcttgaatctgaagagcgcaatggtaggcagtcgccagtccatcaagaagctcgccaagaaggaaaagaagctgctcctaaacctgctgccagaagagcaccaccgccgctttcgtgttcgttttggttgacttcacgagggcttcggggctgtatctttctctttcttgggttgtatcccttct

SEQ ID NO: 5893 - DNA, 526 bp, Aspergillus oryzae
atcggacatcgcattcgctctagcttaagcgtaaatcaaccacagccaccatgggaaagaagagacgtggtccgaccctggatgagctcttagctcgtccttggtgctactactgcgaacgtgatttcgatgacctcaaaatcctcatatcgcatcaaaagggctgcaaaacatttcaaatgtgcaagtacataaggaacagttgtcggctgttgataatgcgcttcccaatcggcaaagtctggatgttgagatcttcggcatggaaggtgtccccgaagatatcatccagtctcacaaccagcgggtcgtaacacagttccaccgagaccgaagctcgaaaacgtaagaggtgtgggagaaggctgaacactgaggattgtcggtacatatgagttcggatcctgaaaaagcgactggcagaacataaagccaaaaaggccgaggctatgactggtggagacctcaaaagcagcggtgacgtgacgcctgttggtgcaggacaaacacagaatgcaggtgcctt

SEQ ID NO: 5894 - DNA, 589 bp, Aspergillus oryzae
tatctctccacattttcccactcaaccttaaacaagttaggccactctttaatcaaccatcaatatgtctgtggaaagggtggaaagggtctcggaaaggtgagtggcgccaagtggtgtgcgtcaccgcaagatcttgcgtgacaacatccagggtatcactaagcccgctatccgctcgtcgtgcaagcgtatctcaaggacgtgccatgatctacgaggagacccgtgcaagaccttcctgggtgtcatccgtgacgctgtcacctacactgagcacgccaagcgcaagaccgtcacttctcttgacgtcgtcgtcttgtctatgccctcaagcgtctaccctctacggtttcggtggttaaatgctttgtgtcctcagccatcctgcgcggtcgacgcgtcggttgtccttccgcagcagtgacgcgacgggttttgcttttaacgtattttactttactattacgcgtccactactgggtctgctagtgttcgtgattgaaatttctgtatcatagcggccttcatgctatcggctggtacctctagaaccatcgcgtcatggaaatgcgcggtctggtatgaa

SEQ ID NO: 5895 - DNA, 734 bp, Aspergillus oryzae
cgcctccaagcttccaaagaacgtgacgctgtcgcccctgtcctctgtgcggacggtctacaagggactaagaatctggtgttcgcaccgttgccatcgtcggtgctggtggtggtcttggttctttggcgttgcagtacgcaaaggcaatgggcatcctcctctggtgtagtggccttgatggcggagaagagaagcgtatcaagccatgtgcgagcaactaggcgccgaggcatacgtcgacttcactaagacccaagatctcgttgcagatgtcaaagccgctacccccgaagcctaggccgggccatgcacatgccggcctcatcaaggctccattcaagactgcaccattgcaggatctcccgaagatcttcgagctcatggagcaaggcaagatcttatactcttgccgtcgccgaaaagcccttccagcaggctgccgaatacgtccgctcgcgcggtaccgtcgttgctattggtttgcccgccggtgccttcctcagggcccctgttttcaataccgttgtccgtatgatcaacatcaagggaagctacgtcggtaaccgagtcaagacggcgtggaggctgtggacttcttcgcccgcggccggccgttatgtgctcgagattcccgaatgaagggaacatgttcataacgcatagaatgaaaacagctacgagtattatgagattccatcgtctcttcctcagggtctccggctacagactat

SEQ ID NO: 5896 - DNA, 731 bp, Aspergillus oryzae
gtccctcttctattcggtgctctgtactagccttttatgttctgggtccagtggatctgctgtcaccctttgtgacctcgacctactgccccggcctgttattccggtaccctggaaccactggtgtccccggaacgtctgctactcccggtgtccctggcacatgtctagtgaacggcaccatctcgtccaccgtctcgaccattttcaactttgatatcccctcatctgacaccggaaagacgtggtcttcctcttccccaagacagcgcccaaggaggatcttgagacttcgtcttattccttcagcgggcgacggcaaggttgacttcgcttccctccaatccgctgctacccagtctaccacctacagcaacgccccagcagtcaaggaattccagttattcccgtcacatctggtacccctggcgtccctggaacggcggccaagtcatcgactgcctcccagaccacacgactgcgtcaccgtctggtactacaactgcaggtggaagctgccccacggatctctctggcgaatatgaattccctcacttgatcatccctatcgactcttcctcaccagatacggccgctggcacatcttacgactatggggacttcactatctcccccggtaactcctatctcgtttcgactttcgagtgtccggcgggtcagaccgtcagctacgaaatgaagaactccggcagcaccgagctggatttctt

SEQ ID NO: 5897 - DNA, 732 bp, Aspergillus oryzae
gaacggagtacataaccgctatcgccggatatttgggtttttatctttgatccatatccgcctcattctatacttatacccgcggtcgacaaaagaagacttcttcctttggcatccctttctcataccagccctgttggtgctaatcccccgagtgattttcctttccgacaaaacactcgatccaaagaaagaataaaaaaccttgcaaagatactggaaaccaaaaaaacataaaaattcctaagaatattaagagattccacacacttgagataaaagtcccaggaaagcttatcgctgattacctcggctgcagcttgacatatatcatttaatgccgcatagtggtactacaggtcattagtactcccaaaattgttcatttgcacgtgcttacggaccgaagaattttggagaatatttgtctcattgctgactgggctggttgcaatattaatcgctcagatcttgtactccctcagcattcctcctgattgattgactcgccatcgcacatcattttccagaagggaaaaaaaaaaaaaaaaaaaaaaaaaaaaggcggccgccaccgcggtggggctccagcttttgttccctttggtgagggttaattgcgcgcttggcgtaatcatggtcatagctgtttcctgtgtgaaattgttatccgctcacaattccacacaacatacgggccggaggcataaagtgtaaagcctggggtgccta

SEQ ID NO: 5898 - DNA, 444 bp, Aspergillus oryzae
ttccggcgtgggcccgtcaatcgcatgctgagaacgttccgcaggaggatgacaagcctttcactgtccagctttccgatgagagctttgagacctatgagatcgatccccctccctacaccctggaggtcaccaagaaggagctgaagcagatgtaccatgacacttatggccggcgcgcctttgaggcgccgccgatcgtctctacaaagaaaagaagatcagaggtttctgccacttgaccggtcaagaagccgtcgcgacgtcacgctttcactccccttgcccgtcgctccgtcaccaccgacgccgcctcggtctcgaccagacgcatggagatgtggtattgagcacgccatcacccgtgacgacaaatcatcactgcctaccggttgccacggttatgcttacattgcgcggtggaaccatccggtccattatcgg

SEQ ID NO: 5899 - DNA, 426 bp, Aspergillus oryzae
ggctgatgcaggacgagtacaacaggtattcatggagctatgcgcgccgtgtctctggatgggacagcattggatgttcctgacggtgtgcggctttatccttgtttttcacccaccacgtcggtaatagctggcacggtaaagacgcttgattttcttcatctctgtttccggcctatcccctactcgcagaccagacgaacggcgcccgacgggttcggacccccgaatcgtcgttgacattgctagggtccgttggtttctgcctctggtgggtttatggtcgactgattttgttgggctcgaagtatcgttatcggtacaccaaggttccaacattttaaagaggaaacagggcctatcactgagacctcatacgagctctacagtcgtcgtgattgagcgtgtccgtcttatatctgcatt

SEQ ID NO: 5900 - DNA, 568 bp, Aspergillus oryzae
ctcacacatcactattttccatctcttgttaccgacctggttccgcttccctgtggccggagagctctctcctccggccctactgccgacacaatggctgaaagctctttctccagcgctagccccagctcaaggtgggcacaaaagatgataaaacttcagcatttcgaaagatctcagaggaacttccagaaccctttccgttattctttctttctaaccttcctctccacgatacctcatatctaaccttgtccagccaacttccttccgcctttcctctctagcgacttcaagtcgcgggcattcggtttccactcggcggcaggtttgtcgtccgctggaaacaacctctttggaggcacacgtatttaatgcacaacacgcgcgcgggcctacgacgtcttcctgaggggtgggaggtgacgtcaccaactgacccgacctttcaaactgcaaatctttcgcaggcgtcctcttgccgccccctctcggggctggcgacgcccatgcacgcctctgcacgcacacccccagccctcgcccccacgccgccttgaatgagcgt

SEQ ID NO: 5901 - DNA, 619 bp, Aspergillus oryzae
atcaagctctcccttctctgaacaataaaccccacagaaggcatttatgatggtcgcgtggtggtctctatttctgtacggccttcaggtcgcggcacaagttggactatatccagggaatgggcttcacagccatctggatcacccccgttacagcccagctgccccagaccaccgcatatggagatgcctaccatggctactggcagcaggatatatactctctgaacgaaaactacggcactgcagatgacttgaaggcgctctcttcggcccttcatgagagggggagctggctaggagataacactgtctccttacctgctttggctgcaacgcctgcggactggcgatcgcaatccatttatttccttctcacggatcgatttgcaaggacggatgggtcgacgactgcgacttgtaatactgcggatcagaaatactgtggtggaacatggcagggcatcatcggcctgatctcgataccaccaaggatgtggtcaagaatgaatggtacgactgggtgggatcattggtatcgaactactccattgacggcctccgtatcgacacagtaaaacacgtccagaaggacttctggcccgggtacaacaaagcc

SEQ ID NO: 5902 - DNA, 473 bp, Aspergillus oryzae
gcggcggcaaggacgaacagctgcggttgcggctggacctgaacctggatatcgaagtgcaactcaaggctaagatccacggtgatctaacccttggcttactcaacaaaatctttcgataccatgttgcctttccacttccttcggtctgcgtcctcctatggttacctcttcctgggttggataatcgcagattagatgggtcctttctcctttccttttgtcccccttcgggctatatattggattagcgctgtaaaaccgaatgtgaatgcgcctaatagaaaaagcatttatcccacgtcgtcggctctcgtttgttatatgatggcatgaacaatcttctccttttcttccgtcggtgtgatgcttgcatgtatagtaattccaggcttgactatgatcatggattaatcgttgagtgcatgggagggataattaatgaattgaaattctatcttcttgggaaaaaa

SEQ ID NO: 5903 - DNA, 609 bp, Aspergillus oryzae
ccatcattctgtgggccccgcccctcgtggtggtcggtctcattctaggcatgtactggagacgctactcccccttatcgaccagatccatatccggagaatcctctttgtaacacctatctggattgccctgactttgcctccgttgcatctcatcaccacgcgtcgtgttatcttgatcatcggcaccattatcctcacctaccactcccgaccagcgagggtatcccgcgttatactatggaggtgaaaccaggccaaaggaatcagagagctccctcggagagctccctacgccatcatgacagcctcgatgagattgttgaaacgatgagagccttcacgactcgctgtaacatgctcctggaaccattcctggaacttacggatttcttgtccaccccggctacatccgcgaccaccaggccagccctgaccacactcttcttccgacactaaccgtccgccggatttgctcgttgatcaccggtctatcgttctcgttgaacgtggacaaggtgacgccgtcgactcggacacaaagccatggccatgctgctagcgttgcaactcgtcggcggggagaatcatccggtgtgccaaagcggg

SEQ ID NO: 5904 - DNA, 351 bp, Aspergillus oryzae
atatagctaagccttcagtcttgtgttgcgcgcttgaaccggtgaggaagtccctagacgataatgtctcataccgaggccgctcgtacgtgcctctcttttcggcaacagcgcttgaaagcctggcagcctatcttgacgccgaggagtgtactgcctttgtttttgattccttgggtgaacaggaaactcggggtgatgtcgagagcgataaaaagattctgccaaaaacaggcgacctgcaaataccgtcgttggtgtcatttttgcacccattgggggccttcttttatgggcaagctctgaggtacaagaaattgtgatagactactctgaatgtgctgataaagc

SEQ ID NO: 5905 - DNA, 588 bp, Aspergillus oryzae
catagatccaagacccaacacagcccggacaagttggtggtcatgaaggtgtcggtaagattgtgaagctcgggtctggaaccgaattcacacataagtccgttatggctacttctgagattccacagaagcaaaaggcggtcgtctatgaccagcctggaactgtgtcaaccaaagtggtagagctagacgttcccgagcctggggcaggcgaggtgctgatcaatctgtcccgctggtgcggaaggactttgcgtcaatcagaaggtttctggatactatacccctggcacttttcagcaatatgttttattccggcgtatgcattcggactacagtgtcatgacaaactcttggagctggcttccactcctctggccttaaggtcggagacagggtgggaatcaagtggctttccagtgcttgcacgaactgtcaaccatgtcagagggccggcccattatgtgacacctatcccagatggcttagaatcaaacacgaagagtcagacgcggcagcacccatgctttgcgcaggtctcactgtctatgctgccctcaaacgagcaatgctcgacctggacagggg

SEQ ID NO: 5906 - DNA, 622 bp, Aspergillus oryzae
tcgtacttcccgccctcgacaagatctccgagcacggcagcaacgtcagcctgcggtacgactgcaattactgaagacctctttcttgatgccaagagaagcgcgacgattgtaagccaggatagcgataagttcctttagaggccgtttaggacgtgacgctacatgacctggacatggccaacgctcggccacaaggtggacaggacgttatgagcatgatgggacaactgatgaagcccaagccccacccacccttactcttccgacgagatcaagaccatcattcgccttcgcgccaagacagaaggtctcaacattaccgaaagaccgagatcacggataagctacgtcaggagatcgacaaggttgttagccggtatatcgaccaaggagttgctgaactggttcctggtgtcctctttattgatgaggtccacatgttggatattgaatgtttcacctatctcaaccgggcacttgaatcctcaatctcccccattgttatcctcgcctccaaccgcggccaccccagctagcatccttgcccgggtcaacggacggccaggaggcatcgaggaggccgacgtggccgaatgcgacactgtcatccgcggcaccg

SEQ ID NO: 5907 - DNA, 533 bp, Aspergillus oryzae
cccacattccaggtgatggaatcggtgctgaagttgctgaatcggtcaagaccatttttaagaagaactttttaaggcccctggttcattgttaagataatgtgcccattgagtgggagcaggtagatgttagtggtgttgatgcgggcaacaaacactcgccgctcctccttggcagcaagawccttcgctagcgttcagtcggacatcttcaagccgaccaagtatggcggcaaatacacggtcacgcttaatctatcgcttcccttcgccgcaacaagctgggtctcaagggtatcctcttcactcatgttttcccgttctgawcaagaacatcccgggctacaagacacgccatgagaatgtcgacctttgcatcatccgtgagaacaccgagtaaggagcagcgcasccgcgcaatctttccttcgtcgcgctgcggtgacagctcccaccgtagccgctgttgagcgctcgggccaccaatcattcaatgttgctctccgacagggcttgatatttttgcctcaatt

SEQ ID NO: 5908 - DNA, 687 bp, Aspergillus oryzae
cagaccctccttccaggactggaggacatgactcaaataacatgtggtgaagctggggctatcaacagtcatgatgaagttgcatccctaggttgtcctctaattgtcctctgcagccttaccttctgcaggagggggattttgcgacgatcgataccacacggcatatcacagaccatgatatcgagcagctacttttcgaggcggaaggccgattacgtgctcgagatgtgaactctactaacgtgcctgataccagggaggtacctgatgatcagccccagcacagcttgtaaggataaacctacggctggcagcaactggttcgaccttccccagacagaattgacaccagaattgaaaagagatttgcaattactcagaatgcggtcggtattggatcctaaaagacactacaagaaggaacatattgtttgttttcaaccaatggcaaataagtcttgaagaacgtgcaggatgcaagcaatggtcttggctacaaagagcccaaacaaccgaagttaaggcacagccgcctaagtattcccaagtgggaactatcattgaaggtcgaacggagttcttcagtggccgtattgccaagaaagaccgcaagaaaactttcgtggaagaagtactagaccaagagcggcacaacaagcggttcgagtctaaatacagagaaat

SEQ ID NO: 5909 - DNA, 433 bp, Aspergillus oryzae
attgcagcttgggtccgtgtccagttaataatggggtctatacacggcgtggcgcgctcagcgcggagtctctcagctctgctcagacatgaaagcgtctcaactcggaatcgattagcagcagtatgctcgtccacgcaatacgcaacggcccctatcatttccttgtcttgacgcccaagatgcgaagtccgctctcctctccgcacggtctatcgagtcaggtcccatatctcacttgtgtgagccgtcatacacaaccggccaccatgaacagttccgctgcgaagacccattgctgcttgactggggtcgtgggtgaaagagttacaacgccaagcgaacgagaacattgtcatcgcccttgcgggaaataagctcgaccttgtcacagaaaacccagacaagagggctatcccaaccgcagatgccg

SEQ ID NO: 5910 - DNA, 443 bp, Aspergillus oryzae
agaattcagcggccgccaccgcggtggagctccagcttttgttccctttagtgagggttaattgcgcgcttgggtaatcatggtcatgaaattgttatccgctcacaattccaccgttgcgctcactgcccgctttccagtcgggaaacctgtcgtgccagctgcattaatgaatcggccaacgcgcggggagaggcggtttgcgtattgggcgctcttccgcttcctcgctcactgactcgctgcgctcggtcgttcggacaacatacgagccggaagcataaagtgtaaagcctggggtgcctaatgagtgagctaactcacattaattgctgcggcgagcggtatcagctcactcaaaggcggtaatctcaagtcagaggtggcgaaacccgacagactataaagataccaggcgtttcccctggaagctccctcgtgcg

SEQ ID NO: 5911 - DNA, 619 bp, Aspergillus oryzae
aacgttggccttgttatcgagtaccgcgagggcgatgcaaacgcccttcgtgtcaacacccgctcattgcaaagtaacgtggacaccaagacactcgtattgcattcaaagctcttcccctctccaactctgtaacacaaacaaggaagagcagcataacagtcagtgaaacagactgggtgcggtctgtctgcgaggaaatagagcgagctatgaagaccggtgaagctcagcgaccagaacagcaacgctccctccagcaatgaatgggacgtgtactcctggttcaagggtacaccccactcgacgacccgattatcaaatgatcaaaaggaaggagccccatccataatcgaggcatcggatattatttccttagacgatgctaagaaacggacaggtatctttgagcatttggtttatgacatcaaaaagttggtgtgggcatagagaccgacagtatattttgttgtcttgtgtgggttacaagcgaacacaattttttctgagagacgatatcctaatatatagaataccacataatgctcttggatttgttgagagcatacaagaacctggatatatgcgaaaaaaaaaaaaaaaaaaaaaaaaaaaaaaa

SEQ ID NO: 5912 - DNA, 278 bp, Aspergillus oryzae
ccgtcatcgtcctacccgcaaatcatctcatcatatagctcgatacgcaaccggcgccagagaacggtacctacatcgcaaccacggacattaactcgcgaagaacgagcagatgcggagttgaagcaattgctagccagcgttttggagggagacatccttctaataaaggagaggcatcgaatgaagcaagggtcaccgtccccgggtccgcagagtccacatcattaaaacccccgccggaatctctctaccccgatacaatgtcctgtcgttct

SEQ ID NO: 5913 - DNA, 277 bp, Aspergillus oryzae
agaaaatcgagggagaacggctggatacccctctcgatcttagtctaccaccgaactacggcggtaacgatcccgaaaaagaagattacgttgtggatgtggttctcaagttattcttgtcgatgcttgtgctatccgccatcgtgtgctcgatgaaggtatctgcacgctgcaaagaaacccttcatgagttcgtggaaaaatctgggctacccacattcgtggctccaatgggtaaaggagcagtggatgagactcacaaggtttacgctggtac

SEQ ID NO: 5914 - DNA, 252 bp, Aspergillus oryzae
gggatggtgctccgctgcgggcggcaggaggcatacgggaatgcatctaaatcccttgccgatgagttgcatgtgcggcgaattgtggcggtgcggactgtcacagcaacggcacctctagatagacttaaagtctatcttattgcccagaccggtgcgaaatcggcagctgtcgtgctgaagcttatttgcaggtaatgggttgaatgtcgggagaagttgaaggtcatgccgtatcaactgaatcagcca

SEQ ID NO: 5915 - DNA, 273 bp, Aspergillus oryzae
cttggaaatctcacttagaggatcttcaatttttgaagtataactgcgcaattgttgggattgtgcaatcaacagcagcatcccactcgttggtttgtataccagtattgcgttccgggcttactgaacaattataaatatcggaagcagcaataggctctacaacatcctgcacacattttaatttaatcatactagccgtcccgttctacgctataagccttaaacatgcgcgaaatagacccactagtttttgaatatcaacatgacagg

SEQ ID NO: 5916 - DNA, 258 bp, Aspergillus oryzae
ttcagacatccacgtccacttcgttttttcatcttctattcagtttcattttcaatatgaagggacttattttctgtaattgtttgaccgtaagaggctcctttcggtcatatattaaatatacttcagacggatctcgccattcttttcgagccgtcgcaatcaactccagtcgtttgataaatcaattccgccattgcgacagccctcaccttgggtgcttccactgccctcgccgctccttccatcaaggcgcgt

SEQ ID NO: 5917 - DNA, 295 bp, Aspergillus oryzae
  modified_base (124)..(124): n is a, c, g, or t
ctctgccagcctgcggcgtacatgaccggtgagcttgaacgtcgcgacacaggaaccgacgatgccaccgccgcaaccccttagacgaattcttgtccttccggacagaagatccagcgcttcnattcacagtacgcgcgcctatatggccgacaacattggcattgctagttgacacattcctgacctccgacgtgggcggccctattgaggatcagaacagccttcacgtgtcagtcggagaccgcggcccgacattgctggaggatttcatccgaacgtgttcctgaacgtg

SEQ ID NO: 5918 - DNA, 271 bp, Aspergillus oryzae
cctctctcctccatttcttcccttctccgcctctgccagccaggcttccaaggttgccgttctaagctcaactggtgccgctggtggcattggctcacctttcccagatagaattctttctatcctttcctacacatcattcacaatgttcgctgctcgccagtctttcaacctcctccagaagcgcgccagctcctcccccgtgtttctgagcttgccctctacgatatccgcggtggccctggtgttgccgctgacctgagccacatca

SEQ ID NO: 5919 - DNA, 284 bp, Aspergillus oryzae
tgccgccaccgcggtggagctgtttcctgtgagctccagctccctttagtgagggttaattgcgcgcttggcgtaatcatggtcattgaaattgttatccgctcacaattccacacaacatacgagccggaagcataaagtgagaattcagcgtaaagcctggggtgcctaatgagtgagctaactcacattaattgcgttgcgctcactgcccgctttccagtcgggaaacctgtcgtgccagctgcattaatgaatcggccaacgttttgtcgcggggagag

SEQ ID NO: 5920 - DNA, 446 bp, Aspergillus oryzae
  modified_base (415)..(415): n is a, c, g, or t
  modified_base (435)..(435): n is a, c, g, or t
cttaaagtctatcttattgcccagaccggtgcgaaatcggcagctgtctgtgcggcgaaggatggtgctccgctgcgggcggcagggaatgcatctaaatcccttcgtgctggaggcatacgaagcttatttgcaggtaatgggttgaatgtgttatgcctgaatcagcgccgatgctgtcaaggaattgtggcatcaaatttggcgcatatgagtctgctaaacgcgcattcgctcgtcttgaaggtcataatgaccctaaacagcttgcaccaacggcgggattgcaggtgccgtatcaaggacagcaacggcacctctagatagatcgcaatttttgtctggagggtgcggtggaatggttgcccaatgttttgtctatccccttgacgaaggtcactttgaaatttcggangcaatgtgagactgtggaangtggtctgaaa

SEQ ID NO: 5921 - DNA, 524 bp, Aspergillus oryzae
  modified_base (216)..(216): n is a, c, g, or t
  modified_base (243)..(243): n is a, c, g, or t
  modified_base (480)..(480): n is a, c, g, or t
  modified_base (493)..(493): n is a, c, g, or t
  modified_base (505)..(505): n is a, c, g, or t
  modified_base (509)..(509): n is a, c, g, or t
atcaaccaagaccctcgttcttgtacaagttcgccgaagagatgttcgaggagatggagtcgatgcccaactacaaacctcgcccagctcccgccttgatcgggaagcttggtaaagcccgtcgcattgacgattgtctgttgtacttcgccgagatgcgtgcccagggtgtgcgtccagcccaccatgcacacgttacaagttgctcatcgaccncaccctctcttgagcctgttgaatatnaagctcctttgatgaggcgaccgaagctttgaagatcttccatcgtgcggtcgctgaaggggttgagcctatactagtgttacctatggaacaattgtgaacgcgctctgccgagtcagcgatgaacgctacaattccatgattcagtacttcctgaacaccaagcgcgaccgcagcaaggttctggcgtactataagcgcatgctcagccgttatatcgcgaaaagtactcaaacntcaagccccggangcaacagagccntacnaagcactccatcatc

SEQ ID NO: 5922 - DNA, 461 bp, Aspergillus oryzae
caaggtaagcttttacccctcgaaggcccgcggtaagaagctctcggatttagctagtgagtttgggggcgagtcccaccatcgcagtcgccaaaatgccttcccgcaagcagtggatcgataaaaagaatgcaactacataccaactcttccaccgatccaaaatgaccccctgattcacgacgcctcagccgatgaccgtgttctggccccggtgtcaaggccctgcaaggtccggaaaaacgaatggaagatgctctgcgacaagtcactctggacgatgcgagaagcgagtacggaccgggaagtgtctacggatctgatatgcgttcaactgcctcgtcctatgtccggcaaccgacctaccaggatcagcagaacgtgcctgatgcgattgctggattccagcctgatatggatccccgtctgcgggaagtattggaggctcttgaggatgagga

SEQ ID NO: 5923 - DNA, 574 bp, Aspergillus oryzae
gctacaaaagcatcttgtactctctgtcaacctttgtcatcctcatttactttgggaagcaagggccttgattccttgcctgctcgggttgattgctatactcaagtcgagtcattgcttcgtctgacgactgttccccccctgggattgatactacgcaatctcttggaactacccaccagatccattatacccatttcttcctctgtatatcattgtctatttttgctccattgtctctacgcaaaccctatcccaatcgggaagttgcagaacatcaggtgcccgtgcatctccaaagcgatacagccctctgtttccattgttggcccttttgaaagatttgatctcgccctcgcattccgttctccacatactgaaataaccacccttgaaccaaagtgggcatgcaaggccacagtgaccatcctgactttgtcctctttcctccgcaatacaacattgaaagtaaaatgttggccttcgaaccgtcgagacagcagcaaaccccatacttccagcatttcactatggatcccgctttgaccgagcccttcccctttcatgtggacct

SEQ ID NO: 5924 - DNA, 345 bp, Aspergillus oryzae
ggcgctttaccgcatgcgcatctttgcgcctaacactgttcgtcagcctcaatgtcatccccgagaagcgtcacctgaaggtcaagaacttcggtatctggatccgctacgacgtggccaagtcccggttctggtacttcttgacccagctccgtaaggtcaagaaggccaacggtgagactctcgctccggtacccacaacatgtacaaggagttccgtgagatgagccgtaccgaggctgttgaggctctctaccaggacatggctgcccgccaccgtgcccgtttcggctccatccacatcctcaaggttgttgaggtcgacaacgccgactccatccgccg

SEQ ID NO: 5925 - DNA, 527 bp, Aspergillus oryzae
gtttgtcattagtcaccagagcactcgacttgaataacggtgggcaaagttagcctgctgatatatgcattgaatttctatatatttataagaactaccaagacatgaaaataatagagaaaaagaacagaaagacaacgctaaatcgcaagtttcatcccagaattatgtatacctgatgtaatgatcgggtatccaaaaagacactccaccgccgagttggcccgtacccagaacctaggtgggtctcgtttgtcgcttgtagctctgcgcggcggagatatggggttggaatgttgtgcgattggcgcggttcatgttcttgagctcgctaaagtccttccagatatcaatggcgaatgcgccgcgattgcagcaccatacctctagagcggtagtctcgtgcatcgctggccgttcaacagggatctggataatatctgcctgggtctaagggaacaagttaatttcatgcttcttattgtgttaagtgaaataagtgcgacatacctgcatgcaaatatcgg

SEQ ID NO: 5926 - DNA, 521 bp, Aspergillus oryzae
agaatcagcggccgccaccgcggtggagctccagcttttgctgcattaatgaatcggccaacgcgcggggagaggcggtttgcgtattgggcgctacggttatccacagaatcaggggataacgcaggaaagaacatgtgagcaaaaggccagcaaaaggccaggaaccgtaaagttccctttagtgagggttaattgcgcgcttggcgtaatcatggtcatagctgtttcctgtgtgaaattgttatccgctcacaattccacacaacatacgagccggaagcataaagtgtaaagcctggggtgcctaatgagtgagctaactcacattaattgcgttgcgctcactgcccgctttccagtcgggaaacctgtcgtgccaaaggccgcgttgctggcgtttttccataggctccgcccccctgacgagcatcacaaaaatcgacgctcaagtcagaggtggcgaaacccgacaggactataaagataccaggcgtttccccctggaagctccctcgtgc

SEQ ID NO: 5927 - DNA, 419 bp, Aspergillus oryzae
gctcagagtgacccgcgacgcctgctcaacgcggacargaagtcaaggtagtgacgacgctcggggtcccagaccgaggtgccctgagcccgagcgaagacgacggggagaggatgatagttgtgagcggcaaaatcactctcagcttgaatcgcctcttgggtggaggcggcgtggtaggcactagtgccgtagagcagccaccagcttagggtggcagtggccttggttgaccgcagagtatgtgttacactgtgacccattggtcttggatgtgccgtttgtgccgttgaccgccatgttaggcaagaaaagaatctattcagggagaaatgacggtgggatatagtggttatggtgggacaaaggaggggatgttgattacggtcagacctgatatgagagcgggagagggaaac

SEQ ID NO: 5928 - DNA, 471 bp, Aspergillus oryzae
acgcgtttctatacactcgttaatttcttcgagttttattatcgcttcagcgtctttgttattttcaaaccgtcaagatgaagctcaacctcattgctctgacttctctggtcgccagggcagtggcaccccatctgacactgagcgctacgccgcctgccagagctcctgctacagcagccacttcttccttgaccgcggcccagtcgactgactctacgtcggactctgccaccggcaccactgttgctccttcggcgactgtcagcttgtctcctcaacagtcctgcgctaagaagtgcgacgcaaccgatctgtgctgcattgctggatgcttcgaggtcccctgccccaacgattctcaggctaacgacaccaacacttgcgtcgccgcctgcccccctatcactgccacgggtaactctggagcctccaagacctctgccagcaactctgacgccaccaccaccg

SEQ ID NO: 5929 - DNA, 588 bp, Aspergillus oryzae
attcagcggccgccaccgcggtggagctccagcttttgttcctttagtgagggttattgcgcgcttggcgtaatcatggtcatagctgtttcctgtgtgaaattgttatccgctcaatgaatcggccaacgcgcggggagaggcggtttgcgtattgggcgctcttccgcttcctcgctcactgactcgctgcgctcggtcgttcggctgcggcgagcggtatcagctcactcaaaggcggtaatacggttatccacagaaaacccgacaggactataaagataccaggcgtttccccctggaagctccctcgtgcgctctcctgttccaattccacacaacatacgagccggaagcataaagtgtaaagcctggggtgcctaatgagtgagctaactcacattaattgcgttgcgctcactgcccgctttccagtcgggaaacctgtcgtgccagctgcattacgaccctgccgcttaccggatacctgtccgcctttctcccttcgggaagcgtggcgctttctcatagctcacgctgtaggtatctcagttcggtgtaggtcgttcgctccaagctgggctgtgt

SEQ ID NO: 5930 - DNA, 541 bp, Aspergillus oryzae
gacaaataccactgccagctcatcgtctcctgggccgactcaaagggcatctcagtccgcggaggcaaaggggtcatcctcgggttgttcttgtgggcgattcggcgcatactatgactatgtgtttgttgtccttttctttttagtatcttgtggggtggagctgtttactaacggaagggatgtagtcagagacgtcccgaaatcaaacgcagagcgcctggccctcatgaaatctctaacgacgaactgggctgatccgttccggtctcttattcaccagatcccagatgagacggaggtggtttcgattcgtgttgtcgattggatttggtgaaggtgccaataacgctatcgtggatgtacaggatctggttaagaggattgattttacgtcagctgagtatgaaaccactcttagttgggtttggttcatgggtgatgtgatatgctaacgaggtgtagatcgttcacgctagatgcccttcgttcttctgttgccgcatatgaacaggatatctttgcccgtgcggaaacgtct

SEQ ID NO: 5931 - DNA, 538 bp, Aspergillus oryzae
cggaaacgtcgctagtggccaagctagatacattggtcgctgtctggaaaactgctgttcgtggagctgcagaggacggcaagttatctggtaaacagggaaagatctatactgtgctgggacgtcctggctgactggaacatatacacgactctcatcgcggggactattatcacctttctcatctattcgtttgctacgtccaaggagccagacattcacccattcttgctggcccgtcagtcaacagccttccccgtccgtcagcctggcgaatctgccgcctaccgcagccttgagaccccacacggatttccccttcggtccggactgaacgtcaaagaccccggagcaccgaaatggaccgctggacgaaaaggtgacttgcgcgatgaagaagggcgatagagcagtcgttggaacaagtaacgcaagagatcaatgtcattggatctctcctgcaatcctccaaggctaaaacagttgccgtctgtcttacagactcggttgagcttttggcctcaatattcgccggtgc

SEQ ID NO: 5932 - DNA, 463 bp, Aspergillus oryzae
ctcacacataaatcactcgtcacaatgggtttcaacgacttcgtttctgaggctggcctcactgttgccaacaactggttcgcgccccgaagctacgttattggcgatgctcctccaggccgatgtcgtgacctttaaggccttctctggcgcccctgacgctgagaagtaccctcacgttgcccgccccgaggcactgagctcccaccaccctaaggacaagcccgccgacgaggatgacgacatggacctcttcggcagtgacgacgaggaggaggaccctgaggttgccaggaagcatgcagagaatcttgctgcgtacaaggcgaagaaggaggctaagggccctaagcccgctgccaagtccattgtcactctcgatgtcaagccttgggatgacgagaccaaccttgaggagatggaggccacgtccgtgcaatcgagaaggacggccttgtctgga

SEQ ID NO: 5933 - DNA, 518 bp, Aspergillus oryzae
ccggcctaccctaacctcagtggtaactcgtttgtctgctcgtcgccactgagttgaattcgtctaccagtagcactgccgaagttttggtcttccgtcgtggacatgagccggcatatttgcgcaccgactcaaagaaacacgatgctgagagcgcagtggagctcagtgcgatgaagcctaccacggagtcgggtgaaggggatatgtctatcataccgccacagaaggatatctttacatggagagacgtttgtgcgggcgctaaagctgggcagcgtgctattagcggtgatgactatatacaggtgaactaccagtatagctacgggcacgtgtggcggaacttcggcatcttgattgcctccttgttgggttcatgatgatttacttcattctagttcagcaacaggatctacaatctcgaaactgctactgtccgcgagtcgctcagattcagcgctctccttcgtcaacccctaatgtctctatccaggaaaagtatgactatgtggagg

SEQ ID NO: 5934 - DNA, 557 bp, Aspergillus oryzae
tgttccctttagtgagggttaattgcgcgcttggcgtaatcatggtcatagctgtttcctgtgtgaaattgttatccgctcacaaattccacacaacatacgagccggaagcataaagtgtaaagcctggggtggccaggaaccgtaaaaaggccgcgttgctggcgtttttccataggctccgccccctgacgagcatcacaaaaatcgacgctcaagtcagaggtggcgaaacccgacaggactataaagataccaggcgtttccccctggaagctccctcgtgcgctctcctgttccgaccctgccgcttaccggatacctgtccgcctttctcccttcgggaagcgtcctaatgagtgagctaactcacattaattgcgttgcgctcactgcccgctttccagtcgggaaacctgtcgtgccagctgcattaatgaatcggccaacgcgcggggagaggcggtttgcgtattgggcgctcttccgcttcctcgctcactgactcgctgcgctcggtcgttcggctgcggcgagcggtatcagctcactcaaag

SEQ ID NO: 5935 - DNA, 250 bp, Aspergillus oryzae
taaaagcatgtcaccttctggattcatagtaagctgtcgcgcgcggtctttctcctttaataatcgcccgccgccaaagtatcccggccatgtcccgctacatgtcggtccttaagaggcgcggaacccttagtctccgcgaattaagcttgtcaacacctgttacgggaacttcgtccaacgtggtgctctggcggttgggtctgctgtgggagctttgttgaatcctcgaaagcaaatctatcccaac

SEQ ID NO: 5936 - DNA, 250 bp, Aspergillus oryzae
atcacatcaagctctcccttctctgaacaattttgcaaggaaaccccacagaaggcatttatgatggtcgcgtggtggtctctatttctgtacggccttcaggtcgcggcacctgctttggctgcaacgcctgcggactggcgatcgcaatccatttatttccttctcacggatcgagacggatgggtcgacgactgcgacttgtaatactgcggatcagaaatactggtggtggaaacatggcaggcca

SEQ ID NO: 5937 - DNA, 250 bp, Aspergillus oryzae
acgccttgggactaacagccacaatgttcagtaccgattagtccggagcccgccccgtcccagatgccacacgttgttgagcatctgtcgccagctcagcagcagaaatagtacccccgcggatcatcccagattacgctctgcgcctcctgctgcctctccttccagatccccacccctgacaccagctgtaccagctctccggctcggaggcggcatgcggcggaagccagcaggacacgccgaccac

SEQ ID NO: 5938 - DNA, 250 bp, Aspergillus oryzae
ggtgtttcgcttttcgtccttggtttcgccatcggacctctgcgtggaagtgctggcgcccagaacatccagactctgatcattcttcgatttttcgccggatctgggctcctctgagtgaaatgttcggccgtcagatcattttctttgtcacttatctcgctttgactgccttcaacttcgtttggctcccccccccttaccaatgcgggaggtgtcattgccgacatgttctctgctaaagagagag

SEQ ID NO: 5939 - DNA, 250 bp, Aspergillus oryzae
gaaagtgaagtactaagatctggcaacctattataccagcctgtggcctgcgcggggaagtggacggaattatagagactccgtccggacgcctgaggcttcccaaggatctcaacaatccaagtcaatcgcatcgcccagcatcgaagaaccatccggcttacgttggccctttcagaaagccagaaatcgttccagtatcctttgtcaagaccttccgattcacaacacatcccctcatcagaaagct

SEQ ID NO: 5940 - DNA, 250 bp, Aspergillus oryzae
tgtcattacactgcagggcagtcaacatgtctagcatccagcatgttttgggtaaagacagactggctgcccgtggtatggcaactgccttcgagtccagaaccgccaacctcctcttccgcgctagcagggcctccctgctgcgccctcgcgctgtcaaccctgtgcgctccaagcctcacgtcaacattggtaccattggtcacgtcgatcacggcaagaccaccttgactgccgctatcaccaagca

SEQ ID NO: 5941 - DNA, 250 bp, Aspergillus oryzae
ctcaaagtgaacgtttagtaggagttttcttctaatggctgccaacaagcaaggcaagatggatagtattggctaacttgttcaacttcatagcaaaaccttactacttcacgcatattctttggttcatatattaagccgcattcgtgcgcatctttcaggaaaatcaactatcggatgagagttactcttaacgatggccgacagatgaccggtcaaatgctcgcatttgataagcacatgaacctcg

SEQ ID NO: 5942 - DNA, 250 bp, Aspergillus oryzae
gtgatacaattgatagcattcttgaatgactgcaagttttgcattaagctgtgtgatgctaagtttgcgctacccaaaaccggcgatgatccacgtctagttttcatcttccaccatggaaagtgcatgaactttgtactaaagggcaccgatgtatacgaaaacttcacccgctcgggcttggatatgccccgactttccctagcgagaatgaagatatttcgattgggctttcgactctgaagctgaa

SEQ ID NO: 5943 - DNA, 250 bp, Aspergillus oryzae
ccccattctagttgctccggagccagagcactgccctggccctgagtcggagcaggcaggtcaaggtgatgcctgcgcgggatgccccaatcaacagatctgtgcctctaccccgaaaggtcccgatcccgatatcccaattatccgagagagaccctcccaggtccgacacaaaatccttgtactatccggaaaaggcggggtaggcaaatcgaccttttcctctctcctcgcgcatgcgttttcagcg

SEQ ID NO: 5944 - DNA, 250 bp, Aspergillus oryzae
cttcaccacactccccttcccgacaccgatcagggccattcgatcaccatggcttccgtcccgagtgtgcaatgcttcggcaagaagaagacggctaggtctacgagcctctcctcatcgtcggtgccgacaagttcgccggtgttgacatccgtgtccaccgctgtcgcccactgcaagcaaggcaagggtctcatcaaggtcaacggccagcccctctctctggtccagcctgagatcctccgcttca

SEQ ID NO: 5945 - DNA, 627 bp, Aspergillus oryzae
gctctgccatacgtgaacaggatatcttccttaagcttcacgataatggcttcttgtcggagcacgtaacaacacaattatactgtgaggagcacaagtcgttcttggcagaccgctttatccagggtgaatgcccacactgcaagtatatcgatgcctatggtgatcaatgcgatgttcctcatctgggcaatttgataggttcgactctgtcggctgatgtctttgccagatatggtcgtggccgtggtgccaacaccctctatgtctgcggtaccgatgagtacggcacgacgtccgaagcgagagccatccaagaaaacatgaccaccaaggaactttgcgacaaatattatgccctccatgctgaagtttacaaatggttcaacatcagctttgatatcttcggccgcacaaccaccgagcttcagactaagatcacccaaccgacggtgatctactctccgctcgctgctcgcattcgctatgtctctatcaccgcaccctacaccgcccagtgcgagacgtgcacccccgtgaagagggatacgaaacatatcttcctgaagttggacaagttacaacccgagatccaggcattcttcgacgagtcttcggcgaagggag

SEQ ID NO: 5946 - DNA, 692 bp, Aspergillus oryzae
cacttgattcgaagaaactgaaatgtcgccttcgccgtttcgaataagctacgtctgtcagtttatgtagtactccactacggattatggagcagcaagaacgatgtgcccaagtatgggtctccttgcggtttggtccgccaagcgcgcgtgccgatagcaaatacagctcttttgcatcgctatattgatcgacgatgtgctgagctcacacaacctcaatagttgcgtcgtgagtctcccgatcggccattggcatacatatcgatatgtgcatgcgttctgaactcgtagcttgtgaaatgagatgcattcttacggtcgcatacgcctggggatacatggagaagcctcttacgctcgaaggatagtgctggaccctaccattgagtgctccacaggtagtcgaggattgatagaacactcaggcatgtcaagagaaatagcgttgagggcgattacgagaaaacagacggaaacaatgctacattcgtcgacttattttacacagcgtatagcgcacagccgttgatagatgctctacgacatacgcaggcaaatcaacgatgtttgagcgaatatcgccgtgtcgctgctactacgagaagcttgtcacgcgttcaaggtcgtcaaatcgtacgccttcgtcagtgttacgcaagtccacagggctcagcgaataatcttgcact

SEQ ID NO: 5947 - DNA, 575 bp, Aspergillus oryzae
gtactaagaagccctccagcaagtacccgccaagaagaagtacggccagtctgctggcaatgttggtgacgagggtggtgttgctcccgatccattgtcagcattgaggaccccttcggtgaggatgactgggagggctggagctacttttacaagacttctgacttccagaatgtgcttcctgtccccttccagaacgtcctgaacggtggctctcacgctggtggccgtctggctttccaggagttcatgattcagactgctgaggaggcacttgacctcatcaccgaggccattgagcaggccggttacactggcaagatgaagattgttccttccgctgccccctctttctccgaggctcttcgccagggtgctgaggtctaccagaagctcaagactctatcgccatggacgttgcttccagcgaattctacaaggctgatgtcaagaagtacgaccttgacttcaagaaccccgacagcgactcctccaagtggctcacctacgagcaactggccgacctttacaagactcttgttgttggtgatgacttgaccgtcaccaaccccctg

SEQ ID NO: 5948 - DNA, 510 bp, Aspergillus oryzae
cctcgcgccttccccccacattactctagaccatcatacattctagactatcatactggacccctagtgtcaaagagcccaagatggcgctctgctgggcccacagatgctacaaagcaactctcccattgaggatctacctagccgccgcagagccggtgcaggacaaggctcgatccgatggtggtcccgcggccaccgttcccatcaccgatacacggatacagagaaggacccatactccgtccaaaaaggattctggtattcgcatattggctggatggttctgaagcagaacccgaaacgaatcggcatcttcgccgtggtatactacttcaacgcaggtcttggcatcacggccggataccaccgcgtcgcacggacgtcactgatcttgacgccgatcccgtcgtcgtctggcagcataccaactatatcaagtcagctctgttcatgtgtctcgtctttccgacgttggtctgcggcctaggctggggtgattggcttggt

SEQ ID NO: 5949 - DNA, 535 bp, Aspergillus oryzae
  modified_base (38)..(38): n is a, c, g, or t
  modified_base (83)..(83): n is a, c, g, or t
  modified_base (88)..(88): n is a, c, g, or t
  modified_base (90)..(90): n is a, c, g, or t
  modified_base (176)..(176): n is a, c, g, or t
  modified_base (192)..(192): n is a, c, g, or t
  modified_base (235)..(235): n is a, c, g, or t
gccttcagtcttccttggatgaaatttagagatgaacngctgaggtacaagaaattgtgataggtgttttttctacgtctganaattntnccaaacctcgcacgaggagtgtactgcctttgtttttcgtcgttggtgtcatttttgcacccattgggggccttcttttatgggcntctgacgaacgagacntttgtcgcttgagtttcaagatcccggaaagcatcaaactccntaaaaaggccaaaaacaggcgacctgcaaatactgcttttcggcaacagcgcttgaaagcctggcagcctatcctgtgttgcgcgcttgaaccggtgaggaagtcctagacgataatgtctcataccgaggccgctcgtacggattccttgggtgaaagctcaggaaactcggggtgatgtcgagagcgaactactctgaatgtgctgataaagcacaacggacccctgtcccaatcccagacaaagtccaatcgttctttcaaatcttccaatcagcagcctaattcgaccttgacgca

SEQ ID NO: 5950 - DNA, 443 bp, Aspergillus oryzae
  modified_base (384)..(384): n is a, c, g, or t
  modified_base (404)..(404): n is a, c, g, or t
cgcaatttcttcccacaagtgcatccggcgatgccacgaagaaccccccggcggctcttccccaaccgagagaaacgcaaaccaagatcaatactgtttccgcatcaaccgaactgtccacccttctcctttcctccgtaagcttcgcggttcactccccgttgcatatatacctaacagcacagccatgtcacagcgcgggaaaaggcctgcgagccgcttgaagccccggcggtggattccctagaaatggtgggattcgtttccaaaggcgatcattgctggaccataaagcccagaatgactacttctccaaaatcgtcgaacgatacatggcattttgtgcccgccactcggaagacttggatgcagcgtggtcataancgtttctagcactgcgtcanaataccagtttcatttccagcgtgtccatgttttctcgt

SEQ ID NO: 5951 - DNA, 414 bp, Aspergillus oryzae
  modified_base (408)..(408): n is a, c, g, or t
tgtcgctattctttgatgagaacttgaaaaagggcatcaaaggcaaaacggagactgaagtggatgctcttctggacaacggcattacccttctacgctatgtgaaggacaaggatctctttgaggcgtactacaagaagcacctatcccggcgtcttctgatgaagcgctcagttagcatggatgccgagcggcagatgatatccaagatgaagatggaggtcggaaaccagttcacgcaacgcttagaatccatgttcaaggacatgacggtttccgaagacttgactgctagctacaaggaacatattcggggggcaggtgatcccgaccagaagcccgttgatttagaaatcaatgtccttacgagtactatgtggcccatggaggccatgtctagtatttaanggcgaa

SEQ ID NO: 5952 - DNA, 413 bp, Aspergillus oryzae
  modified_base (381)..(381): n is a, c, g, or t
ctttcattgattatccggctcttaccgcgcaggatcacggttaagttacctggaataatccgtcttgtgcagcgctaaagctgcctagatgggcctgtatcatcttccctccaaactaccgttctcaaagcggcggttaaggccgcgcattgttatctcatacattcttgactatcacctcaggaaatctctacggaaatcttatgatttcatttgttcccaacgcatctccacgaaagtgattcttgtcgcatgtatcgccggcttttacatcctcgactctatcgagccgtatcatcagcatttctccttgaacaatatttcccttatgtacccttacgctgtccatgagcgcgtgtccatcccactcgcccttttccngggtggctcctttgaataataattgcggtcta

SEQ ID NO: 5953 - DNA, 425 bp, Aspergillus oryzae
taccttccattttccattcctcttactgagtccttacaatggcgacagatatcgctacaagggatcttcgcaagcccatagatgtcgctgagtacctcttcaggcgacttcgctcgaatcaatggaatgttctgctttagtcaccacctttggttgtgggtgagctatcggcgctcaatgctacgtgaggttggcgttcgtgcagtacacggtgttcctggggactacaacttggtggctttggattacctgccaaaatgcgatcttcattgggtaggaaactgtaatgagcttaatgccggatacgctgctgatggatattgcctggtgcatactccgaatttgtgcctatcgttcacattgttggtcaaccgccatacgaaatcacagaaggaggatgctcctcccccacaccttgggcacgc

SEQ ID NO: 5954 - DNA, 458 bp, Aspergillus oryzae
  modified_base (191)..(191): n is a, c, g, or t
  modified_base (221)..(221): n is a, c, g, or t
  modified_base (235)..(235): n is a, c, g, or t
cacttgcgtcggactcacttcaacccctgccagcgtggccggggcggacgtgggaaggatagtgagaagcgcggtggaaagggcggtggtaatcatccacaatgggttgcccacaatctccccagaagactttccggtcccagggctggagtcatgttatctcgatgctcagcctttagttcctgagatcnatcgtatgtttgacttgacttttcttttcnatagactttctgangattccctatggaagtccttaagcactggatggtacagaaggaggaagtagttctcgagaacgctcaaaactatattgaccaggaagcactaggtgacgatctagttgcggcaccaccccctattcccacagaggaacgtttgacgaaatgggttatgatacattgttctacctttcctgtggatgggcctggaaccatcacttgatgcctcatatgatcccc

SEQ ID NO: 5955 - DNA, 437 bp, Aspergillus oryzae
attcatgatttctgcagatgagaagcatgatgtcctcgttctccagcgccccggccagttgaggcgcgacaccaagggcaacaaagacggcaacgtccttctcgccctttccgggaagtccactacccccagcgctatcagctcgctcctcttctcgctttcgaatcgcccaagagtgacaagctttccttgttcgagctcggagaaagagcttacgaccatgtagaactcgaccttcatctgtctaccgaccgttcctccgttgtcgttgatcactttgattaccgcggatacaaccctcctccttcctcctcggtcgaaaggcttcggaccttctttgaaccccaagaacatcatcgtgacactcttcttcggtgggtgagggcgttctggctttcccaaggaccgccccttcacactctgggtgactccaaccc

SEQ ID NO: 5956 - DNA, 512 bp, Aspergillus oryzae
  modified_base (447)..(447): n is a, c, g, or t
acggtacattcatggatgggaagctgtttacaatgacctgagcggaacaagtccctttaatttcttcaagacatcctccaggatagaccagatctctttccttctttacggctcgggaatccagccctgggacttcttgaacattcctgtggcattcggcgcgaaggacaagtacaaaggatacaaggtcacaacccgagacgagttgagggagcttttcgcaaatgaagaatttgcttcggcaccctgtctccagttggttgagctccacatgcctcgcgacgattgcccagccagtttgaaattgacagccgaatcggccgaatcggtttcagttagcatgccaccatgcacacggggcatttttaattccatcatgacatgtggttaagagattttgttcgttttgcgatagttttataatgagttctttatctgctttcctcnccttctttctttcatactttctaagttaaacatatcagatttaattaatacaatgaataaatttt

SEQ ID NO: 5957 - DNA, 382 bp, Aspergillus oryzae
  modified_base (294)..(294): n is a, c, g, or t
agcagattcccgttcctaaaccaggaccagatgagattcttgtcaaggttcgctactcgggcgtctgccacaccgaccttcacgccttgaagggtgactggcccctcccagtgaagatgcccctcgtaggtggacacgagggagctggtgtggtcgtcgccaggggctgtaagcaagccgacgagcctctctgtccgaatgcttctttgtccggctacacgctcgacggcactttccagcagtacgccattggtaaggccactcacgcctccaagcttcaaagaacttctctgnacctgtcccctgacctggtaactgaattcgagattggcgaccacgctggtctcaaatggctcaatggatcctgtctcgcctgtgaatt

SEQ ID NO: 5958 - DNA, 374 bp, Aspergillus oryzae
cgacaacaaccgccgacaacatacatcccaagggagtatcctagtgacggcaagggacaccttcttggtcgtctggccagcactgtcgctaagcagttgctcaatgcgtcgtcgtgaggtgtgaagccctcaacatctccggcgagttcttccgcgcgaagctcaagtaccacgcctaccttcgcaagaagcagcgctcttcctttcgctggatattttcgtgacagaagagcaggatgtcctccaccgagccagtcgtcgtcattgacccgtttcaaccctacccgcggaggtcccttccacttccgttgctcctctcgcatcttgtcagaagatctacaaggccgtccgtggaatgattcccacaagacgcc

SEQ ID NO: 5959 - DNA, 390 bp, Aspergillus oryzae
gaggaaacgactcctatggctccgtggctcatatggctccaagaatgacaacagctacggatcctctggcgattcctatggttctaagaacgaagtaaccgcaaggacaacgactcctacggctcgagccacaataccagcagctccaagcagcacggcaacgattcctacggttcgaagaaggacagctatggttcttccaccgattcctatggatcgggctcgaagaatcaacagctccggtaacaacaacagctcctatggctcgtccgaccgggacaactacggttcttccaacgattcttacggttccgatagctacggctctagccgtgataatgacaatgactcctatggctcaaagaaggataactatggctcctctatacg

SEQ ID NO: 5960 - DNA, 381 bp, Aspergillus oryzae
gtcaaaatgtcgatccccgagatgcagtggcccctcccagtgaagatgcccctcgtaggtggacacgagggagctggtgtggtcgtcgccaggggtgacctgggctcaagtggccgagcagaagggcggtccgctcatctacaagcagattcccgttcctaaaccaggaccagatgagattcttgtcaaggttcgctactcgggcgtctgccacaccgaccttcacgccttgaagggtgactggtaactgaattcgagattggcgaccacgctggtctcaaatggctcaatggatcctgtctcgcctgtgaattctgtaagcaagccgacgagcctctctgtccgaatgcttctttgtccggctcacggtcgacggccttt

SEQ ID NO: 5961 - DNA, 441 bp, Aspergillus oryzae
  modified_base (382)..(382): n is a, c, g, or t
  modified_base (404)..(404): n is a, c, g, or t
  modified_base (414)..(414): n is a, c, g, or t
  modified_base (418)..(418): n is a, c, g, or t
aagaagccgactcaattggtcgtcagccctggtccgggccacccgacaaccgacgctggaatcagtaatgctgcaattcaatacttcagcggtaaagtacctgttcagctgggtgaggacagtagtagaccgttatcatggtgtgagacacaaggagcttgcagtggaaagtgtccatttttggtgtgtgtatgggtcagcaatgcatcatctcttccttcggtggcaaagtcgatgtcacaggcgagatcttgcatggtaagacatcggtgataaaacatgacggttagggtgcatatgaagggctgccgacctccctcgccgtgactaggtatcattcccttgctggaacacactcaacatccctgattgcctggaggtnacgtcttacgccttcatcctgnaagtttctcncaantaaggcccaaggatgtttagact

SEQ ID NO: 5962 - DNA, 624 bp, Aspergillus oryzae
ccgcctaaacaggcctgcgacaattgccgtcgacgcaaaatcaagtgttctagagagcttccatgcgacaagtgccagcgttctcggagtcgttcactcgactaccacccccagatctcgtctcctctcccgactcgacaaactcgctattcgactcgtccactatcggcgcactccccgcgccacgccgtcttctgtcgacgccaaacccttctctcctgttcctacagcgacgtgctccgtcgcaagggccccaagttccgcacgctctaccctctcgctcatctacatccagacttcaagtacctgttcccgatcatgcccgtcgtgagacaggaccagctgcagcaggactgccaccattctagcccatgtcaatgtcttccgccggagcgcttgtctccccaacgctacgctttcattgccgcaactgaagctggacggtgcagcaccgggtcccgaggcggcttccgcgcgagccagcctcgacggacatcctatgttgtcgggagaagaactcctggctgaagccgtgcgcgcaagaaaggaatacaacgtggtctctatgcgccatccatccactcgcctcacgaccacgtcctctcaccaaggaatggctgcccc

SEQ ID NO: 5963 - DNA, 616 bp, Aspergillus oryzae
cacccttcccggcccctccttagagccgaatttgccttccctccttatttctacgacagcccttgcattcactaccagcagaatgatggccgccagctctagctccagtgccagtgccagtgccagcgccagtgccatcaattccgcgccagcgccagtgccagcgccagtgccagtgccagcggaagtggcaatgtccagattgtgaacaacctcggcagcaccgtatacctgtggtccacctccgacacctccagcgacacgcagaccatttcctctggcggcagctattccgaggcttggaagacctctctaagatccttctttccgcagtttgtgcgatgactgcttctgccctccctcatcactaccccagaggtagtcctgtcagcgttgctccgaccaccacttccatccaccggcggtatctccatcaagatggcaaccacagacagtgaaccagcgtcttgcaattcgagtacaccgcggatggccgtttactgggatctctcgtctatcaacctggactctgactcggaatttatcaccgctggcttctcaccccgagtgattcgagctgttcgtctgcatcctgctccgcgggagataccgactg

SEQ ID NO: 5964 - DNA, 694 bp, Aspergillus oryzae
cagtgatccgctacctattattaggtggtctgtcccttcgcgactcgcagattcgccgtttcggtcgccatcgcaatgcctacatatccgatccgacgccggcctcgcgagtgcaaaacttgtctacgcactactaccccccggatccctcctcctcccctactatcgaggattccggagctattcatggggttgagcgatgatcgattgagaagtggatttgtttctcgtgcatctcattcgtgctcccttcggtcgctttatgcgtgctgtctccgtcaccctaggctcgtcggtggcctcgcttgaccttcaacgatctgatctcgaatggctgaagctgacacttgccatttcggttgaaccatccagtaataataataatagcctctcgcgcccgacttcgtcccatcccccatccggcggggcgacaagaggacgccatgtcgcgccagtaaggttcgttgcgatcgcacgtcccgtgcgggaattgcgtcaaacgtaactttacttgttcttacggtcgtccgccgccaactcaacctaaaccgccgttcattccagatcctaccttttcagctgccgcctccactgtgtctacacctcaatttccttcgggttcagcctatatatcttctagtcgagacgatgcccccatttcctcctacagcgcagagccgacctcggatgatgc

SEQ ID NO: 5965 - DNA, 665 bp, Aspergillus oryzae
gccgtcatggaatcccttaagaccaaggcccgccagcaaggcctgtggaacatgttcctgcccaagaaccacttctcccagggcgcgggattcagcaacctcgaatacggtctgatggccccccgacactggaaacatggaagtcctcgccaagtacggtaacgaagcacagaagcagcagtggctcgagtatcccctaccgccagcaatccgtcatcctcgtccccgccgacacccccggaatcaccgtgcaccgcatgctttcggtgtacggctacgacgacgccccccacggccatggccacattagcttcaaggatgtgcgctgggaaagagcaatacgtcctcaatggatcgaaatggtggtcttccggcgcaggcgatccccgctgcagcatctacctggtaagttggcctcggaggctacgaataatgctgggcgcccttgctggacggcaagatccgctcggccttcctcatgacagagcccgaggtagcctccagtgatgcgacgaacatccagctgaacatccgccgcgaaggcaaccaagcttcgagatcatccagggccgtctgggtcccggccgcatccaccacgcgatgcgcacgatcggagccgccgagaaggcgatcgagtggctcatcgcacggatcaacgacgagcg

SEQ ID NO: 5966 - DNA, 732 bp, Aspergillus oryzae
gttctaattaaatatcagatcacataataaccccaaaatcttgtccaaagaaacaatcatgtccacaaataacatagtgatcctgggagccgggcaaccggagattggttctccgaattggtgcagaaggaaccttggtataaagatgtcgtaccagatttccgcaattttcccgacaatgagctagcgcccggcattgacaacgcctcagtgttcacttccgtctgcatcaacacagcgatctacctaccctggctaattggccaatgccgcaagaccggtgtggtcttcaaacgagcagtgatcaagcagtgtcgggactcaccacggcatatctcctgtctaaagatgcctccaattcaatcacagtgctcgccaaacatatgccgggcgactacgacatagaatacgcctcgccgtgggcaggtgccaattatcttccggtgggcaaagccagtagctcccatgggaaatgggaacgaaacacctggcctgccctcaaggaaataacggaaaagtacccggaggctggaattcatttccaagatgcgattgtctataatcgtacgaaagatcaaggatcaatgtcgcggacgcagccagcctccatcattcaggaaagaaagccgacgtggtagtcaactgcaccggcctttcctccagaaagctaggtggcgtcaacgacgacaagctccaccccatccgtggccagattgtcgtggtccgcaacga

SEQ ID NO: 5967 - DNA, 612 bp, Aspergillus oryzae
ctcaaacaggctggcaatgagaagcagactttggagcaactgcacgatttcttggtggccaacaagccactgacttttgacgattgcattagcctggggttcgatagctcaaaccccacgcacctcgggttcatcgttgccggcgcgaacctccacgctttcaactatggaatcaagaaccccggagcagacaaggaatactaccgcaaggtcgtcgacaatatgattatccctgaattcacgcccaagtctggcgtgaagatccaggcagatgagaatgaggccgacccgaacgctggaaacgctggctcatctttcgctcgccatcagtttgaaggtcagtacaacaatgcaattcagcagttactgtacaacttccctcgagattccaagacctcttctggacagcctttctggtccggccccaagcgtgctccaacacctttgaaatgataacgcggagatccagcgccttgtcgactcgctgccatcgccgaagtcacttgctggattccgcttgaacccagttgagttcgagaaggatgatgataccaaccatcatattgacttcattacggcggccagcaacctccgagccgacaactacgaaat

SEQ ID NO: 5968 - DNA, 543 bp, Aspergillus oryzae
gaccaggataacctcatcccggatgctgaattcgacacaatcggccttgtccttattcctagagtagtgcaattgttgatcgtctgactcgtcagctctcccttccgttcccctccgcaacccaacggccggctgcccccgaattaagtcctgtccttgacaagttgaaagttatctgcggggaggatatagtaacgtcccaggtcgcctccactgcaaccgaatgtctgcttcgccttcgtcacacattcatcgataacgctcccactacggctgtgcatgttggaaaactgtgtggattacattcacgactagctaccataacgcataccaatgcagaccgccttcatccttacactaagtgctggctcatggtgtctgatggtctctggccatcgaataggtagtcggggataagcttcagcggcgcaatgagccggtccacttccgccctctcgcggtccccgtcctcaagcatccaatagaggcgaaggaggccttccgacacctacatggttttcagaccctgttagaccttcttcg

SEQ ID NO: 5969 - DNA, 459 bp, Aspergillus oryzae
cgccaacgaccgtcgatacgccgacatcaagatggtcaacatcatccgcaagcccgttaccatgcactcccgcgtccgtgcccgtgagctcaacgccgcccgcagaatcggcagacttcgcacccagaagcgcctggccgcctccgtggtgggctgcggcaagcgcaagatttggctcgaccccaatgagatgaatgagatctccaacgccaactcccgtcagaccatccgtaagctcgtcagcgatggcctcaaccgcggtctgggtaagcgtaagggtaccaaggaggcccgtatgcccagccaggttctctggatgcgccgcatgcgtgttctccgtcgcctcctcgtccgctaccgtgctgctggcaagatcgacaagcacctttaccacgagctctaccacctgagcaagggtaacaccttcaagcacaagcgcgctctcgttgagcacatcca

SEQ ID NO: 5970 - DNA, 291 bp, Aspergillus oryzae
caggcaagtcctacagcgagcccttacaacggcagtccccagctgaactacgcctacacgcttgacaacgccggcgtgtggtacgacatgtccgatgtcttcggtccgccacgacgatgcctccggcggcgtctccctgaagatcaccaccgtcgacaacggtctctgaccctttctctggcagcgcagtggtcatcaagccatccgacacctcctgtccttctatctgctggccacagggcgtttcacccggcggtagccaggtgaaggtttgccagagtaattcggatg

SEQ ID NO: 5971 - DNA, 308 bp, Aspergillus oryzae
atatacttctagaccatcatacattctagactatcatactggacctctagtgtcaaagagcccaagatggcgctcgatgcaaaatcaccgacagttgctactttaaacgatggcactacagactatgtccccatgaggaaaaagtacacctccaaccagccgcacatcactgagcaacccatcacttggggcaactggtacaagcatgtcaactggttgaactgtttctttattctcttcattccttcctaggctgccttggagcatatggacactctccatctctatacgggcatcttcgccgtggt

SEQ ID NO: 5972 - DNA, 280 bp, Aspergillus oryzae
gtgagggaaccatccatcgtcactcatcgccacccaccgacttgtacatgtcagattctgtcgcgaccaatgaagccaactttctggctgtctcagaggtcgtaaatgcggtgatcgatcgcgattcctattttcgccgtgtagggggaggggaagagatgacggatgtattgtccgaccgacctgggcggggtacccctcgcgccgtatgagaacgggcaactcggcatggagacgctggttcaccacttgatcgatcacgcaacagccaggcgcgcca

SEQ ID NO: 5973 - DNA, 275 bp, Aspergillus oryzae
gcgatgtgagagacgaacccttgttcagcgatgaggcttcacgtcgatcaattactgccgacaccgctagccctgcatctggtcctggtcctgattgagatatacttgtgtttagaaagtctctcgtggagaaagcgaagagcgagctttcgggcgggtgcctgctctgaaaccaatgtacctcctccaaagagcagaagtagagctggcaaaatcctacgccggatgctcatcggtgggtttgccacgacgaaattgtcgcagcaacgtgctat

SEQ ID NO: 5974 - DNA, 260 bp, Aspergillus oryzae
gcttggcctccggtgaatattctgtacctaagaacaaagatatctggatcggaaaggaacggctccgttgggcgcgttacttctccatcaattatgtcccgatcttcctgggagacgctaccacattagaccccatgattgatgaatgcctgcgggaagttcccgccggattacattatacttggatgtcgttagcccgttcgggtatatcgcattccacgtactgaaattacgaaattcccccgttttcgccaagtgca

SEQ ID NO: 5975 - DNA, 281 bp, Aspergillus oryzae
tgagagcgctcgcggccacacagaagtacttccatgatcacgaacacctacacgaatgcaagcctatacatgagcgagctgcaagtgaagttggactggtactaagagtgtccaagagacggttgtttcgttggcctgccccccgaacggtgtgtttaggatgtttggcgctagtcttcaccacgctggtgactatgttcgttggatatacaaccggaccctgagcccgtgaacagtcaagtctttcgccaattatccgagagacctcggctggctcctca

SEQ ID NO: 5976 - DNA, 384 bp, Aspergillus oryzae
gcaactccaccagtgatctctggcgcaagctctctatctacgccgttttccttgccttatccttggctccctcgtggaatacccataccaaaacatccgggtgaagaacttcccctggggagatggtgacaagaccatcttctggaacgaaatgccttcttcgtctggctcagcgctctgcgcagcagcagcgttctgctccggttcgctctgccattcagcgccggttcaacagcaccgactccaagcttccctggatggtcgacaacgaattcaaccgtgagatccctcaagagcggctgtcaagcaccacgctgccttacaacctctgggaagagcactgggagcactgggaggtccacatgcctcctcttgaggagcgtc

SEQ ID NO: 5977 - DNA, 210 bp, Aspergillus oryzae
  modified_base (185)..(185): n is a, c, g, or t
  modified_base (194)..(194): n is a, c, g, or t
ctaagcttatcggatactgaaccttgaatatactttcaagatgatcgatccacccgccgagatgatcgacttcttcgataccctcaagacgaagccgctgcccgtgcccaccacgaccccgacatcggttgcccccgtgcccaccgtcgtccctggccatgatgtattaacataaaaagcacganatcctgaanattcccacaaaaagca

SEQ ID NO: 5978 - DNA, 431 bp, Aspergillus oryzae
  modified_base (213)..(213): n is a, c, g, or t
  modified_base (399)..(399): n is a, c, g, or t
gatggacttcccgtgccaattttgggacaaccacctgcagcacatcgatacagaaagatccccaaggatcgatcatgagacgagtggccatgaccacggtcacagccatcaggacatgtcgatgcccgccatcttcacaacaggaacaaaagtaactttattcttcagtgagccctctttccgcggttacatacaagttcaacacgaaagatnccatttcgaaagaacatcgccaacggcttccctttgcatctggacgaccaattccatgaccacctatctcctcactctatcattgttgttcctgcttgcctggttcaatcgtttcctcggagcactcaagttccaactcgaaaataagattaactcaactcgcgcgtcttccacctttacatgaanaataagcggaaacgagttggttactcggcagt

SEQ ID NO: 5979 - DNA, 407 bp, Aspergillus oryzae
  modified_base (54)..(54): n is a, c, g, or t
tcgatcccaacggcatcttgcgtatcgtgtggtatgaccggccactgggcggantattcgtggtgccccggccatcgtccttgcctctcttcgtcgggcttaggcgcgcgtatatccgcgatctttgtgattctcattgtcgatgtcatctcaaccgctgttcaacgtcgatctcgacaccgcagacccggcagagatcatctgttacctcaatgcctcggagaacgactatgatgggcacattcttcccagtactagccaagcgtgctccccggcttcacatcccactatacgtctacctcttcgcacggtacttcggcgcaggcgtcgcgacggcctttatccatctcttggatcccgcatatgatgaaataggacaataattccttctcgactttggcgcggaa

SEQ ID NO: 5980 - DNA, 420 bp, Aspergillus oryzae
ttcagcggccgccaccgcggtggagctccagcttttgttccctcagtttagtgagggttaattgcgcgcttggcgtaatcatggtcatagctgctggggtgcctaatgagtgagctaactcacattaattgcgttgcgctcactgcccgctttccagtcgggaaacctgtcgtgccagctgcattaatgaatcggccaacgcgcggggagaggcggtttgcgtattgggcgctcttccgctactcgctgcgtttcctcctcgctcactgtgtgtgaaattgttatccgctcacaattccacacaacatacgagccggaagcataaagtgtaaagcctcggttcgttcggctgcggcgagcggtatcagctcactcaaaggcggtaatacggttatccacagaaagggataacgcaggaaa

SEQ ID NO: 5981 - DNA, 330 bp, Aspergillus oryzae
ctgtcttcgtatattccctggtatcaagccagaccacatcgggctggtgtaaatgattgacggtcaagataacgctttgattaaagtgcttgcggatgccatcaagcgagggattgtgattgttaacgttactcaatgtttgactggcagcgttagcccggtatatgccaccggtatgagcttgtctgccgtgttgagactagacggactccgtggtttagtgttagagacctttggagctggtaacgctgtcgcaggtctcgacttaactacggaagccgccctaacaaaactggcgtatctccttggtctaccagacgcaaccccgga

SEQ ID NO: 5982 - DNA, 402 bp, Aspergillus oryzae
  modified_base (386)..(386): n is a, c, g, or t
tacagcttctattcttatatattccctttttattcgtaccgctggtcttctttctcttttactcgcagcgattcccgctgttaccgcggagcggggtaacattcccttctccttcgcagtctctactcgtaaactcatactttctttccttgaccgagcgactacatctccgaaccttggtctcgcgagtccatccttcctaccaactgccccccttcgctatattgttgttattttggtcttattccaatttctttctacttgtgcagacctccttttcctttttcttttttcacagtacaaatagacagaaggcgttttaatgcctgggtaacaagaatcctggacggcacctggcaagtctactagcgactaatgaggccgantttgacgcgctcaaga

SEQ ID NO: 5983 - DNA, 455 bp, Aspergillus oryzae
  modified_base (8)..(8): n is a, c, g, or t
  modified_base (415)..(415): n is a, c, g, or t
cgtccccncattttgtctctacgtctggatgtctcttgtgtcattcctggccaagttcatgggcatgaatctacaggcgaaagccagctcccaggaatcctgcaccttctcaacagtctgtaagctttcattttcaggctgtcgattacgaggaggatcttgtctcgggaaggcttccaggactctctgtttcatgcagtgtgtatgagtcggtagcgtttatattaaccagctcgttcgatcctttcctttcggcttcttctgtcaatcagttaatgaaccgctaatcgctcgttcactcgaagcgatcgagttcggcaagcctagaaggtcgcccaaggaagacacagttttatccgcataggtggatttatgtaggcagtcattctgtgaaggcaaaaaaaagcaagagaangtggaaagtcagtcacccggctaatggacgataggctgaa

SEQ ID NO: 5984 - DNA, 330 bp, Aspergillus oryzae
  modified_base (94)..(94): n is a, c, g, or t
  modified_base (111)..(111): n is a, c, g, or t
  modified_base (140)..(140): n is a, c, g, or t
  modified_base (169)..(169): n is a, c, g, or t
  modified_base (265)..(265): n is a, c, g, or t
  modified_base (270)..(271): n is a, c, g, or t
catggccatgattagcgaaagcagcgtcgtgacctccgaggctgtcaccaccctccactccaccagcactgccaccgtcactcctggtgttgangccaccggcgctcagantccaccgtggtcacactggcggtgttccnaaccgcgcctatcagcctgaggttcctgncgagggtgatgagaactgcgaatgtaccaccaaggtcatcaccatcactggccctccctttccaccacgaggtccccagcgttcccagctaccctnttttnnatcaacaccccggctcctgagcccagcagcagcagcagctctggcacttctgaaggcct

SEQ ID NO: 5985 - DNA, 396 bp, Aspergillus oryzae
cctcgtgccgcagctttcccccggttggttcttaattcccccaacagcaggagaaaaagattcacggctgtcttggtgcctggcctggccaccctttgctgttgtttcctgcacttttctactctctctttccttcccccttcaagttcttgtctcttgttcgacccgttcgtaccctcctcagggtcctcctcctggacaatacgcacctcaaccccaaatgggatacccgcagcaacaaccagctcctgtgacttggcatttcttagacatctatcatcatgagttaccaacaacagcccccttatcctccccagcctgcctacggtcctcctcccggtaactacggacctcctcagggcggctaccctccccagcagtacggcggttaagaga

SEQ ID NO: 5986 - DNA, 427 bp, Aspergillus oryzae
cttctcttcttcttctttttatcctttgattttccttccgctctttcagctggcccttccaccattccttgaagttgatgtggactgggttgacactcctgatcttcttggtcatgagccagatgcctctctatggtgcttcatatctaatcaagccctttacgcccctcctcccggaggtggcagctcctgagaccaaggtgcccttcaccactttaaccagtttcttttctcttcccccctactttatcatactggctgcgtatgatgttggccagtaaaccgtggtaccctgaatggaattgggtatcactcccatcatctcagtatttggaagctggaaagtcactacttcgaatgagcggacttcgcattgtctcctctgacacttcccgatcccctgctccggcatggttttccactcctc

SEQ ID NO: 5987 - DNA, 428 bp, Aspergillus oryzae
  modified_base (134)..(134): n is a, c, g, or t
  modified_base (163)..(163): n is a, c, g, or t
caggtgctcgacggtgatccggcctacacttgtccctaccagaacgtcatggacggcgtactgaactatcccacgcaggcgtgtactgtatcgaacctggctcttgggctacccgaaccgacagcgagctgttnaatttattgcttccgcgaacgcaatcggnaaacccacggttcgcttcttacaccaacgacatagccctcgccaagaacgtcgcagcattcatcatcctcaacgctatgcgccgtcaaatatttactatccactcctcaacgccttcaagtcaacctccggcagcatggacgacctctacaacatgatcaacccgactgtccagactcaacactcctgggcacattcgtcgagaaccacgacacggaatccccatcatctacgccggccaagaacagcactacgccggcggaaac

SEQ ID NO: 5988 - DNA, 485 bp, Aspergillus oryzae
  modified_base (180)..(180): n is a, c, g, or t
gattatctgctctgatacactccacggaggttactactattactatgaatattctccattctactctctccacttggagagaccgtcttgccccagtgtcgatgcaggccacgatgatgagcttgttggggacatgctgtctgggggaacaggaggtgttgatgatgatggatggctacnaaccggcggagccaagattctgcggaccgacaagagaataggataaaggatgttcgaacagtggaagaatcccgcacctccactttccgcaacaccggccagatcactcccgaggaattcgttctcgcaggcgactaccttgtctacaaattcccatcgtggtcatgggccgacgcatctaaccccgcaaagcgcgtttcctacctgccccctggtaaacagtttctcgttacccgaggcgtaccctgtcaccgccgactgaacgacaacttcgctggtcgggaacatgggagaacgagaggagg

SEQ ID NO: 5989 - DNA, 427 bp, Aspergillus oryzae
  modified_base (404)..(404): n is a, c, g, or t
caaacccgtccaaataccatgcagaggggagttcactattaatcatgcaacgatctaccaaggacgtgatcctctcacgtagacagatcgaagccctaatttgttagtttgaattcgctggcaatcgattattatcgtgaaccagaaggttgatgcgagtgagcgtgttggctcgatgctgacggtttcggtcggagggctgtagattccactgtgaagagacgcgacagatgagtgagaggtaccaaattggtcggattgagggaagcttcgtgtggatgcctggattccgtatcatcctggcggacagaaggttatccagcatgttgttgggaaggatgcgacggatttctagttgatgggcgaatttcgtgccacctattcaaggaggagttacgaagaanatgatgaatcgactatcttagtc

SEQ ID NO: 5990 - DNA, 497 bp, Aspergillus oryzae
  modified_base (38)..(38): n is a, c, g, or t
  modified_base (104)..(104): n is a, c, g, or t
caagagtcaagcagattcccgttccctacacggtcganggcactttccagcagttacgccattgggtaaggccactcacgcctccaagcttccaagtggagaangttcctctttaaaccaggaccagatgagattcttgtcaaggatcccaattcgctactcgggcgtctgccacaccgaccttcacgccttgaagggtgactggcccctcccagtgaagatgcccctcgaaaatgtcgatccccgagatgcagtgggctcaagtggccgagcagaagggcgttccgctcatctactaggtggacacgagggagctggttcgtcgccaggggtgacctggtaactgaattcgagattggcgaccacgctggtctcaaatggctcaatggatcctgtctcgcctgtgaattctgtaagcaagccgacgagcctctctgtccgaatgcttctttgttccggggacgctgtcgcccccgtcctctgtgggggtatcacgg

SEQ ID NO: 5991 - DNA, 509 bp, Aspergillus oryzae
  modified_base (484)..(484): n is a, c, g, or t
  modified_base (493)..(493): n is a, c, g, or t
ctcaggtgtcctaccgcttggctttcctttcggcggctgcgacatatggtatcgtggtgtacaagggatcaagcagtattacgaatggagtagaattgccaggtggtcaaatccaaccagcatgggctgaccataaatcaggaatggcgattgtctggctctattcccgccaggtcccattggccctcctcccctttagcgtctactcgatcttcccatattgcccgtggtcgtcttcagggtagcgttccgaacattgcggtgaagctcgctggtgatgaaaatgtccagtatcttggtctcctctcctggtgctgccaagcccgctgccagtcctttgggcatcaactactactcgtcctcggccgaaaacattggaagatttgacgttgcgacatactctcgcgcccacctgatccccactttgcagcctcccgcccagggcgccggatccgcgtcgccccagcatggattctcgtccctngggctcganatggccctgctgttcc

SEQ ID NO: 5992 - DNA, 492 bp, Aspergillus oryzae
  modified_base (435)..(435): n is a, c, g, or t
  modified_base (466)..(466): n is a, c, g, or t
  modified_base (480)..(480): n is a, c, g, or t
ctcagctcttctcaaaattatatccatatacggattcagcagcgcaatggtgtaaaagggcccagttacagagtttttaactcttacccctcgctttcatactacaaccgcttttgaagaagttcgcctgcaatggcaccatcgtcgctctacgaacgctcgcgatcgctacaagcagcgatagtgagatgggcgaggtgattcagctgcaaggtgatcagcgtttcgagaaaaggccgagtttatgtccatcgaaaacctcaagaccttcgaccccttcgccgaagctgacgaagacaccggcgagaccacgaaaaaccttgactaccgttcagggtcttcctaagaagtttgatcagaagaagatcttaaaggtgatcaaagatgttcaggagttcttgaccgacaagaaggagggtctcgagctggaaggcnagaccatcaaggtcccggtttctaaggagangccgcgcccgttcngatcccagtcta

SEQ ID NO: 5993 - DNA, 513 bp, Aspergillus oryzae
  modified_base (490)..(490): n is a, c, g, or t
cgatcatgagaacccatcacccgcttacactagctctaccgaggaacccctcagttcgttgccaattttgaaagcttaaaggtggagggtgtaaaggagggttggctttccctgcctcctttgcccactctctcctgcgatgaggaggaaccgaaggtggtcctgggaagcgaggctgtgtgaaagtgacgtccatgccgagcttttggccagtgccgactggactcggtcagcaacttcgcctcccatgactttgagcaggccacctccgacttctgtgaccctcggcagctgactgtcgagtcttccgtcaacacatcctctcccgctgagcttcctgtcttcatcaacgccaattctctcaccgccagtcagagctcagacttcctctctgcccacgggtcttgcccctctctttctccttcgccttctcctgtatcttccttgtttactccgtctcagtcgactttgccagtccccgaaccttaantcgaagaaaaatttgtcaaccgc

SEQ ID NO: 5994 - DNA, 338 bp, Aspergillus oryzae
  modified_base (270)..(270): n is a, c, g, or t
  modified_base (294)..(294): n is a, c, g, or t
  modified_base (329)..(329): n is a, c, g, or t
caaacccgtccaaataccatttaatcgattattatcgtgaaccagaaggttcttcgtgtggatgcctggattccgtatcatcctggcggacagaagggacagatgagtgagaggtaccaaattggtcggattgagggaagatgggcgaatttcgtgccacctattcaagaatcatgcaacgatctaccaaggacgtgatcctctcacgtagacagatcgaagccctaattgcagaggggcgaggagtttttcggtcggaggacgaagaanatgatgaatcgactatcttagtcnaggaacagcaagatattcctcgacagggctcgaanttgccgctg

SEQ ID NO: 5995 - DNA, 446 bp, Aspergillus oryzae
  modified_base (388)..(388): n is a, c, g, or t
caagatccccatctacaagcagattcccgttcgggtgacctggtaactgaattcgagattggcgaccacgctggtctcaaatggctcaaaagtcgtgtggtcgtcgccaggtgaattctgtaagcaagccgacgagcctctctgtccgaatgcttctttgttccggctctgtctcgcctctaaaccaggaccagatgagattcttgtcaaggttcgctactcgggcgtctgccacaccgaccttcaaaaatgtcgatccccgagatgcagtgggctcaagtggccgagcagaagggcgttccgctatggatccgccttgaagggtgactggcccctcccagtgaagatgcccctcgtaggtggacacgagggagctgacacggtcganggcactttccagcagttacgccattgggtaaggccactcacgcctccaagcttccaaa

SEQ ID NO: 5996 - DNA, 559 bp, Aspergillus oryzae
  modified_base (418)..(418): n is a, c, g, or t
  modified_base (427)..(427): n is a, c, g, or t
  modified_base (444)..(444): n is a, c, g, or t
ctcgtcctcggcccaggtgtcctaccgcttggctttcctttcggcggctgcgacatatggtatcgtggtgtacaaggtctggctctattcccgccaggtcccattggccctcctcccctttagcgtctactcgatcttccacgttgcgacatactctcgcgcccacctgatccccactttgcagcctcccgcccagggcgccggatccgcgtcgccctcctcggacatattgcccgtggtcgtcttcagggtagcgttccgaacattgcggtgaagctcttcaactactacgctggtgatgaaaatgtggaatggcgatttcctggtgctgccaagcccgctgccagtcctttgggcagaaaacattggaagatttgtcaagcagtattacgaatgccagcatggattctcgtccctngggctcganatggccctgctgttccnctggcccttccagtatcttggtgagtagaattgccaggtggtcaaatccaaccagcatgggctgaccataaatcaggagttttgaacttctccaagggaagattcttcttcttct

SEQ ID NO: 5997 - DNA, 522 bp, Aspergillus oryzae
  modified_base (401)..(401): n is a, c, g, or t
  modified_base (440)..(440): n is a, c, g, or t
  modified_base (457)..(457): n is a, c, g, or t
  modified_base (463)..(463): n is a, c, g, or t
  modified_base (501)..(501): n is a, c, g, or t
taactccaccgcaacctcctttcttccctttctttcaacacaagatcccaaagtcaaaatgtcgatccccgagatgcagtgggctcaagtggccgagcagaagggcggtccgctcatctacaagcagattcccgttcctaaaccaggaccagatgagattcttgtcaaagattggcgaccacgctggtctcaaatggctcaatggattctgtctcgccctggtgaattctgtaagccaagggttcgctactcgggcgtctgccacaccgaccttcacgccttgaagggtgactggcccctcccagtgaagatgcccctcgtaggtggacacgagggagctggtgtggttcgtcgccaggggtgacctggtaactgaattcgccgaacaagcctctctgttncgaatgcttcttttttccggcttacacggttcgaaggcncttttccaacaattacnccattngtaaggcccctcacccccccaactttcaaaaatttccntggaccgtttccccccccccc

SEQ ID NO: 5998 - DNA, 451 bp, Aspergillus oryzae
  modified_base (21)..(21): n is a, c, g, or t
  modified_base (23)..(23): n is a, c, g, or t
  modified_base (62)..(62): n is a, c, g, or t
  modified_base (253)..(253): n is a, c, g, or t
  modified_base (399)..(399): n is a, c, g, or t
  modified_base (436)..(436): n is a, c, g, or t
  modified_base (445)..(445): n is a, c, g, or t
cgctggatgctattgcagcananggttcgaagaacttgggcccaactaccaagaaaaggtcnggcaatggcccaggcttatctgacagcaatatagctattcttagtcaccccaactgtcatcctacctgtctcttctttctccctgtcttttggtctttcccaccgcgacttccaatatcaacattatgacggaaactcaaacggtcttggcatcacgccagtccgggcggagctctgagagtagctattcntactaccgagaagcaaaatctggccgtgcacagcgtcccatcgactcggccagacttacataactccgcctctcctaagcggtggaaaaccttttggaccgctttccggtatctttcaacatctgaccccgaagcaggtcgatgantttcatgggcatcttatgtcatctacaacctagaacnggtccgatnaagaag

SEQ ID NO: 5999 - DNA, 283 bp, Aspergillus oryzae
agggcccagctaaacaggaagaagaggagagcgaactggacgactgggagaaggctgctgacgcagaagatgacgtgaaggactcatgggacgctcctacagatacctggaggctgccgccgcaagggctaaggcgcagcgtgaagctgaagaagaacgccgaaagaaggaggccgaagagaaggcgaaggctgaggctgaagccgccgccgccgcttcctccgctgctggtggaggaggaagacaataccgaaaagccagccacaaatggcgccaacaagac

SEQ ID NO: 6000 - DNA, 394 bp, Aspergillus oryzae
cagaaaccgatctgaactacatcgcagacggggcttatgtcctcggctgcgggggcgggggaagtccagacgcaggccgtatccaactacaggaaatgctccgccttttcagtggggcctcagattcgattctacgaacgcccccgttttcgaacccgaacttttatggggccgcgcagcaagggtacaaaatccgctgcattgatcattctgtcctgccggatgatgcactagtctactggggaggacggatgggatcaccggcaacgacagtagagcgactccaagctcacgaaacggtggatgccatcggtcagctcatgcattatatgggtcacaaatccttcgatgccgttgatgggccctcgaaatcggcgggttcaaatggttcttt

SEQ ID NO: 6001 - DNA, 317 bp, Aspergillus oryzae
  modified_base (156)..(156): n is a, c, g, or t
  modified_base (240)..(240): n is a, c, g, or t
  modified_base (263)..(263): n is a, c, g, or t
  modified_base (281)..(281): n is a, c, g, or t
ggtactgacctttggcccaaggacctgaccgagtacaactggactactgagtgcaccaagttggacgatcttttcgtctggtggaccaccccggctaaccgcgacaagtatggtcacatctctcacactttcactcatgaagagcagaacaatgcnatgccttgcgggcctggttacgaaaacggcatcaccaactggtgttggtgataacactcgcacaccgcttcctcaaccaagcanaacagtatgtgggccttacttcntacctccgcattcggaanggatttcgaaggtatgcaggtaaacccccgttgggc

SEQ ID NO: 6002 - DNA, 266 bp, Aspergillus oryzae
  modified_base (258)..(258): n is a, c, g, or t
ccggcgttgtggtatcacaagggctaaattctgggttcatagggcttgccttctgtcccttggacctgtcctctcatttcaattggcttttttcctttgtttaatacatatattattcttttttgtataatattcgcgcaatgcaccatctcggcaaagttttgacggctttcgcggcctgtgcaggcctgggcgttgctgccccttcttcggctcaaataacccctagagaggtttcgccgcaattcctcccaacanctcaccct

SEQ ID NO: 6003 - DNA, 236 bp, Aspergillus oryzae
cccagctgtcgggccacgccagcttcggcgagtatgtccaggaagaactgtccaaattacaggcgatgaaaggagggtctccattgcagccgtgggaccacatgacgctcagtgataaaatggcgaaaagccctgaggccgtttccaactttctgacggcgttggtgggcagcaaccgccatgcctactatgttcatcaacgcgttctgcaatattcgcagtcccggcgatcgcgt

SEQ ID NO: 6004 - DNA, 315 bp, Aspergillus oryzae
  modified_base (183)..(183): n is a, c, g, or t
  modified_base (194)..(194): n is a, c, g, or t
cacggaacgattcgggtagtctccggtgtatatactggggatttgatagtccttcggtcaatcaacagagaggtactccgtggtcaacggctgcctattttcagaaattgcactcgtttcagatgctggcgtgccccttttcggagggttacatgccatctaaccgagcaggttcaatcattnatctcccgtancttggtttggccttccgaatatcctggaaatcctcgtaccccggggataagccatgtcgcaagagaccgagcccctccttcctcgctacgaggaggacacgaccctccaacggcggttgca

SEQ ID NO: 6005 - DNA, 540 bp, Aspergillus oryzae
  modified_base (435)..(435): n is a, c, g, or t
  modified_base (533)..(533): n is a, c, g, or t
ctcgcggtggttggtgcgtgctggccgcatggaggccaagaacactattcgccggccgctcacctggaagaacgcacgtcgattcttctactggcgtgtgcgtcgccgtctcagcgaggaacttatcctcaagcgcatggttgctgcggcaccgtctcccgcaccccgcagctccgacgctctctggaagactcgtcgctcagtaaagagcagctgtcggagatcaagactaagatggctgcccgcgaggagcaacttctgcccgtctatttgcagattgctctgcagtttgctgatcttcatgatgacgccagcagtggtgccatcccgaccaccccaacccggaaactctcttctactgaatcgctcgctcgactcacctttacaccctgggttactggactggaatgcttgataacaattggacgtgatgancaacgtggttcttgagcctgagggtattgttaacatcaaataccgccgtgacaagcagttggataccatggctcgcctggatgctacttatggccttntggtttg

SEQ ID NO: 6006 - DNA, 301 bp, Aspergillus oryzae
ttccaacttcactttacagctagattttcttctctccctcagaaatacctctggtcatttgtctcggcggatacatcccggtgacttcgtgctttccctggggtgtttccagcccaccaagggattggcacaatggatacgacgattcttcgttcgcaaagataccaccaagggtccgaacggattcgtcatctgccgcccacatcgagccgatcaggcgcccatatattcccgttccctgccctcccttggcggatcttatcgttaggatgggtgggcgggcgttcccgcgggctaactt

SEQ ID NO: 6007 - DNA, 52 bp, Artificial Sequence
  Description of Artificial Sequence: Synthetic oligonucleotide
  modified_base (52)..(52): n is a, c, g, or t
ttctagaattcagcggccgcttttttttttttttttttttttttttttttvn

SEQ ID NO: 6008 - DNA, 44 bp, Artificial Sequence
  Description of Artificial Sequence: Synthetic oligonucleotide
gactagttctagatcgcgagcggccgcccttttttttttttttt
